United States Patent Application Publication US 2017/0283862 A1 - sequence listing, part 4

SEQ ID NO: 2 - DNA, 5974109 bp, Klebsiella oxytoca KCTC 1686 (residues 1-1,991,370 of 5,974,109)
  misc_feature (5617061)..(5617061): n is a, c, g, or t
atgaagatgtggatgaaagcagggagtaaaaggcagaaatgaccgcggagataggttttatgggtaaaccgatgtccggtcggttcagacgacaaaaactcaaaaagcccatccgtcaggatgggctcttcacttgtttgatgcctggcagttccctactctcacatggggagaccccacactaccatcggcgctacggcgtttcacttctgagttcggcatggggtcaggtgggaccaccgcgctagtgccgccaggcaaattctgttgtcagaaacgaatcttttacaccgatgctgcgttggctgcattcgtaaagtcagtcacatactacagtatgctccttcctttacttcatttgccgccttgcctcagcgtaaaatctttcgttcccgaaaatctgtaatcaatgctgaaattgttgtcttctcaaatcgccaaaacatcttcggcgttgtaaggttaagcctcacggttcattagtaccggttagctcaacgcatcgctgcgcttacacacccggcctatcaacgtcgtcgtcttcaacgttccttcaggacccttaaagggtcagggagaactcatctcggggcaagtttcgtgcttagatgctttcagcacttatctcttccgcatttagctaccgggcaatgccattggcatgacaacccgaacaccagtgatgcgtccactccggtcctctcgtactaggagcagcccccctcaattctccagcgcccacggcagatagggaccgaactgtctcacgacgttctaaacccagctcgcgtaccactttaaatggcgaacagccatacccttgggacctacttcagccccaggatgtgatgagccgacatcgaggtgccaaacaccgccgtcgatatgaactcttgggcggtatcagcctgttatccccggagtaccttttatccgttgagcgatggcccttccattcagaaccaccggatcactatgacctgctttcgcacctgctcgcgccgtcacgctcgcagtcaagccagcttatgccattgcactaacctcctgatgtccgaccaggattagctgaccttcgtgctcctccgttactctttaggaggagaccgccccagtcaaactacccaccagacactgtccgcaaccccgatcaggggcccacgttagaacaccagccattaaagggtggtatttcaaggatggctccatgcagactggcgtccacacttcaaagcctcccacctatcctacacatcaaggaccagtgttcagtgtcaagctatagtaaaggttcacggggtctttccgtcttgccgcgggtacactgcatcttcacagcgagttcaatttcactgagtctcgggtggagacagcctggccatcattacgccattcgtgcaggtcggaacttacccgacaaggaatttcgctaccttaggaccgttatagttacggccgccgtttaccggggcttcgatcaagagcttctccgcgaggataaccccatcaattaaccttccggcaccgggcaggcgtcacaccgtatacgtccactttcgtgtttgcacagtgctgtgtttttaataaacagttgcagccagctggtatcttcgactgatttcagcttcatgagcaagtcacttcacttaccatcagcgtgccttctcccgaagttacggcaccattttgcctagttccttcacccgagttctctcaagcgccttggtattctctacctgaccacctgtgtcggtttggggtacgatttgatgttacctgatgcttagaggcttttcctggaagcagggcatttgtcacttcagcaccgtagtgcctcgtcatcacacctcagcgttagtgacgctccggatttacctggaacatccgcctacatgcttaaaccgggacaaccgtcgcccggccaacatagccttctccgtccccccttcgcagtaacaccgagtacaggaatattaacctgtttcccatcgactacgcctttcggcctcgccttaggggtcgactcaccctgccccgattaacgttggacaggaacccttggtcttccggcgtgcgggtttttcacccgcattatcgttacttatgtcagcattcgcacttctgatacctccagcaaccctcacaggccaccttcaacggcttacagaacgctcccctacccaacaacacatagtgtcgctgccgcagcttcggtgcatggtttagccccgttacatcttccgcgcaggccgactcgaccagtgagctattacgctttctttaaatgatggctgcttctaagccaacatcctggctgtctgggccttcccacatcgtttcccacttaaccatgactttgggaccttagctggcggtctgggttgtttccctcttcacgacggacgttagcacccgccgtgtgtctcccgtgataacattcttcggtattcgtagtttgcatcgggttggtaagtcgggatgaccccctagccgaaacagtgctctacccccgaagatgagttcacgaggcgctacctaaatagctttcggggagaaccagctatctcccggtttgattggcctttcacccccagccacaagtcatccgctaatttttcaacattagtcggttcggtcctccagttagtgttacccaaccttcaacctgcccatggctagatcaccgggtttcgggtctataccctgcaacttaacgcccagttaagactcggtttccctgcggctcccctatacggttaaccttgctacagaatataagtcgctgacccattatacaaaaggtacgcagtcaccccaccccaaaacgctccactgcctgattctggatgttgaacgtcgcttacgctccgttaaccgtccatcatgctgtcgttacgcattttgcgcaccacgcaaagcgaaacgctttggtggtggggctcctactgcttgtacgtacacggtttcaggttctttttcactcccctcgccggggttcttttcgcctttccctcacggtactggttcactatcggtcagtcaggagtatttagccttggaggatggtccccccatattcagacaggataccacgtgtcccgccctactcttcgagttcacagcctgtgtgttttagtgtacgggagtatcaccctgtaccctgcgactttccagacgcttccactaacacacaagctgattcagactccgggctgctccccgttcgctcgccgctactgggggaatctcggttgatttcttttcctcggggtacttagatgtttcagttcccccggttcgcctcgttaacctatgtattcagttaacgatagtgcaacgaattgcactgggtttccccattcggacatcgccggctgtaacggttcatatcaccttaccgacgcttttcgcagattagcacgtccttcatcgcctctgactgccagggcatccaccgtgtacgcttagtcgcttaacctcacaacccgaagatgtttcgtaaaacatcgtcgtgtcgcgaaaatttgagagactcgaacacacttgaacagtgtgtcgtttcaattttcagcttgatccagatttttaaagagcaaatatctcaaacgtcacccgaagatgagttttgagatatcggttggttgtgcctttcactcacagccagcaagtggcgtcccctaggggattcgaacccctgttgccgccgtgaaagggcggagtcctaaccgctagacgaaggggacacgaggtgtcgcgacttcgcagccgtcttgcttctttacatctatcagacaatctgtgtgagcactacaaaggcaggttctttaaggtaaggaggtgatccaaccgcaggttcccctacggttaccttgttacgacttcaccccagtcatgaatcacaaagtggtaagcgccctcccgaaggttaagctacctacttcttttgcaacccactcccatggtgtgacgggcggtgtgtacaaggcccgggaacgtattcaccgtggcattctgatccacgattactagcgattccgacttcatggagtcgagttgcagactccaatccggactacgacatactttatgaggtccgcttgctctcgcgaggtcgcttctctttgtatatgccattgtagcacgtgtgtagccctactcgtaagggccatgatgacttgacgtcatccccaccttcctccagtttatcactggcagtctcctttgagttcccgaccgaatcgctggcaacaaaggataagggttgcgctcgttgcgggacttaacccaacatttcacaacacgagctgacgacagccatgcagcacctgtctcacggttcccgaaggcaccaaagcatctctgctaagttccgtggatgtcaagagtaggtaaggttcttcgcgttgcatcgaattaaaccacatgctccaccgcttgtgcgggcccccgtcaattcatttgagttttaaccttgcggccgtactccccaggcggtcgacttaacgcgttagctccggaagccactcctcaagggaacaacctccaagtcgacatcgtttacagcgtggactaccagggtatctaatcctgtttgctccccacgctttcgcacctgagcgtcagtctttgtccagggggccgccttcgccaccggtattcctccagatctctacgcatttcaccgctacacctggaattctacccccctctacaagactccagcctgccagtttcgaatgcagttcccaggttgagcccggggatttcacatccgacttgacagaccgcctgcgtgcgctttacgcccagtaattccgattaacgcttgcaccctccgtattaccgcggctgctggcacggagttagccggtgcttcttctgcgggtaacgtcaatcgacaaggttattaaccttatcgccttcctccccgctgaaagtactttacaacccgaaggccttcttcatacacgcggcatggctgcatcaggcttgcgcccattgtgcaatattccccactgctgcctcccgtaggagtctggaccgtgtctcagttccagtgtggctggtcatcctctcagaccagctagggatcgtcgcctaggtgagccgttaccccacctactagctaatcccatctgggcacatctgatggcaagaggcccgaaggtccccctctttggtcttgcgacgttatgcggtattagctaccgtttccagtagttatccccctccatcaggcagtttcccagacattactcacccgtccgccactcgtcacccgagagcaagctctctgtgctaccgttcgacttgcatgtgttaggcctgccgccagcgttcaatctgagccatgatcaaactcttcaatttaagtttgatgctcgtagaattaaacttcgtaatgaattacgtgttcactctttgagacttggtgttcattttcgtccgaggacgttaagaatccatgtcactttgagtgcccacacagattgtctgataaattgttaaagagcagtgcaacgcggctttcgctcaccgttgcgaggtcccgtataatacgttttcctcactcagagtcaagcgcttatttttgcttttctctgccggtattcatcgctgaataccgctgacccggcgggctgtaagccgttgttccgtgtcagtggaggcgcattatagggagtaattctgaagtggcaagaggaatttcaaaaaaaaactccacccgcttatttttcaaccaaagctgcagctgagaatacattatcgcctggtttttaaacaaaaacgagcccggcgggcccgtttttgctgttttgtgatttactgcactgccactatccggtcgtttttcacaaccagctgcacttctttacccggtattagctcaccagagagaatctgctgcgccaacgggttttcgatctgctgctggatagcacgtttcagaggacgtgcgccataaaccggatcgtaaccgttttcgctcagcagcttcagtgcctcatcagagaggtgaacttcatagccgcgttcctcaagtcgtttatacaaccgctgcagctgaatctgcgcaatagaagcaatgtgtttttcacctaacgggtggaataccaccacttcatcaatacggttgataaactccggccggaagctttggctaaccacgcccagaaccagctctttcatgtggctatagtccagggcaccaaaacgttcctgaatgagatccgaaccgaggttagaggtcatgatgacgaccgtattgcggaagtcgaccgttctcccctgcccgtcagtcaaacgtccatcgtccagtacctgcagcagaatgttaaagacatccggatgcgctttttccacttcatccagcaggatgacggaataaggacgacggcggaccgcttcagtgagatagccgccttcttcataaccgacgtatcccggaggcgccccaaccagacgtgaaacggagtgtttctccataaactctgacatgtcgatacgtaccatcgcatcgtcgctatcaaacataaagttggccagcgctttacagagttctgttttacctacaccggtagggcccaggaacaggaacgagccaattggacgattaggatcggataatccggcacggctacggcggatcgcattcgataccgcttcgaccgcttcgttctgaccaatgacgcgactatgcagctcctgctccatacgcagcagcttctcacgctcgccttccagcattctggccaccgggatacccgtccagcgagccagcacttccgcgatttccgcatccgtaactttattacgcaacagacgcatcgtcttgccttcggattgcgttgccgccgccagctgtttttccagctccgggattttgccatactgcagctcggacatccgcgccagatcgccgacgcgacgcgcctgctcaatagcgattttcgcctgttccagctcagccttaatcgtctgggttccggagagcgatgctttttcagccttccactcttcttctaagactgaatattgacgttctttatcggccagttcctcattcagcatatccagccgcttaatgctggcttcatcagactctttcttcagcgcctgctgttccagcttgagctgaatgatgcgacggtcgagtctgtccagctcttccggttttgagtcaatctgcatccgaatgctggaagcggcttcatcgatcaggtcgatagctttatccggcagctgtcggtcggcgatatagcgatgagacagcgtggctgccgcaacaatcgccgggtcggtgatctgcacgtggtggtgcagttcataacgttctttcagaccacgcaaaatcgcaatggtatcttcaacggtcggctccgccacgaatactttctggaaacgacgttccagcgcggcgtctttctcaatgtactgacgatattcatccagcgtcgtagcgcccacgcagtgcagctcaccgcgcgccagcgccggtttcagcatgttaccggcgtccattgcgccatccgctttacccgcacccaccatggtgtgcagctcatcgataaacaggatgacgttgccttcctgcttggcgaggtcattcagaacgccttttaagcgctcttcaaactcaccgcggtatttggcacccgccaccagcgcgcccatatcaagcgccagcacccggcgccccttcagcccttccggcacttcaccgttgacgatccgctgcgccagcccttcaacaatggccgttttacctacaccgggttcaccaatcagcaccgggttgtttttggtacggcgctgcagaacctgaatcgtacgacgaatttcttcatcgcggccaatcaccgggtcaagcttgccctgctcagcacgttcggtcagatcgacggtaaattttttcaaggcctgacgttggtcttcggctccctgatcgttcacgctttcacctccgcgcatttgttcgatcgcctgactcacgttggcggttgtggccccggcggattttaaaaggtcggtcagcgtgccgcgtgattcaagcgctgccagaacgaacagctctgacgaaataaagttgtcctttctcttttgcgccagcttgtcgcaaaggttcagaatacgcactaaatcctgggacggttgaacatcgccgccggtaccttccacctgcggcaatcggctcaacgcctgttcaatattggtgcgcaactctccggcattgatgcccgccgaagttaataaaggacgtatcgatcccccttcctgattcagcaaggcgctcataagatgaagaggttcgatgaattggttgtcgtgcccgagtgcaagggactgggcatcggcaagagcaagctggaatttattggtaagacgatccagacgcataactcctcccataacaggtcaaatttgctactggagattaaatgaggtcatccctcaattattcaaggttaaagacctgaactatgcaaaaataagtttgccttctggatcgtcttagttcgggaggttatatcagccagatgaaacttgccatacgacccgtcgtcttgtcgcgacgataagagaaaaaatcatctttttcgctgagggtacagcggtcaccgccaaaaatctgctcaacgccaacgctcgccagccgctgacgcgcaagctgatagatatcagcaaaatacttttcacctgcaggacgaaatgcgcgctccgcctgagtatcttttgccataaaggcctcacgcacctccggaccaacctcaaacgcgtccggcccaatggcaggaccaagccaggccatgatgttttccggtttatcggcaaaacaggctacggtttcttccagcacgccttcacaaaggccccgccagccggcatgagcagccgcgacttccgttcccgcgcggttgcaaaaaagcaccggcaggcaatcagcggtcatcaccgcgcataccgtacccggcacattgcagtatgaagcatcagcacgctttgactcgtacggcccgccgtcgagctttaacactgccgtaccgtgaacctgctccagccacaccgggtatgacggaagaccgccagcggcgaacatacgccgacggttctcttctacgtgctgcagattgtctccgcaatgggctccgaggttaagtgaatcgtatggcgacaaactcaccccaccagcgcgcgtggaactacaggctgccacgccttccggcattggccattgcggtacaatcagtttagtcatagccagtcaatatcgtctttatgggtttcaaaatcagcgcgcatggcatcaatcaaatcaaccatatcctgtggaattggcgcatgccattccatctcaatgccgctgatcggatggtataaacgcagcatggtggcatgcagggcctggcgatcgaacttacgcagagcggtgatgaactcttccgatgcgcctttaggcggacgcgggcgcccgccatagacctgatcgcccaccagcgggtgagtgatgtgcgccatgtgtacgcgaatctgatgcgtacggccagtctccaggcgcaaacgcagacgagtatgaatgcgaaaatgctccatgatccgatagtgcgtcaccgccggttttcccatgggatgtaccgccatatgcgtacgcttggtcgggtggcggctaatcggttcttccaccgttccgccagcggtcatgtgaccaatcgccaccgcttcatactcgcgggtgatttcgcgcagctgcagggattccaccaggcgggtttgcgccggaatggtcttcgcgaccaccatcaagccggtggtgtctttatcaagacggtgcacgatccccgcacgcggcacgtcagcaatggccggatagtagtgcaacagcgcattcagcacagtaccgtcagggttgcccgcgccagggtgcacaactaaatcgcgcggtttattaattacgaggatgtcatcatcttcataaacgatattgagcggaatatcctgtggttggaaacggacttcttcttcgatttcaacatcgatagcaatcgtttctccccccagcactttctctttcggcttgtcgctgacgctgccgtttaccagcactctctggtcaaggatccattcttttatgcgcgaacgcgaataatccgggaacaattcggccaaagcctgatctaagcgttgtccgagttgattttcggacaccgttgcgttgagttgtactcgttgtgccatatacagcttcttcgttttaacgttgggttttacggctttgccgtttaatatagtgtgctattgtagctggtcttaatcgggagcaggaacagagattctcccgcataaacattttgaggaagtcaaaacgtcatgacgcgcatgaaatacctggtggcagcagccacactgagcctggctttggtgggttgctctggctcaaaggaggaggtgcccgataatccgccgaatgagatctacgcgaccgctcagcaaaagctgcaggacggtaactggaaacaggcaataacgcaactggaagcgttggataaccgttatccctttggaccttattcccaacaggtacagttggatctgatttatgcgtactacaaaaacgccgatctgccgttggctcaggcagctatcgatcgctttgtgcgcctgaaccctacccatcctaacattgattacgtcatttatatgcgtggtctgacaaatatggcgttggatgacagtgcgctgcagggcttcttcggtgtcgatcgttctgaccgcgatccacaacacgcgcgcgatgcctttaacgacttctccaaactggttcgtggctatcctaacagccagtacgctactgacgcctacaagcgtatggtgttcctgaaagatcgtctggcgaagtacgagctgtcggtcgtggattactataccgatcgtggcgcatgggttgcggtcgttaaccgcgtagacggcatgctgcgtaactatccggatacgcaggccacccgcgacgcgcttccgaaaatggaaaacgcctaccgtcagatgcagatgaacgcgcaggctgacaaggttgcgaaaatcatcgcggctaacagcaagaacacctgatagcccttagataagcaaaacggcagccgagtggctgccgtttttttattcgttaaattgttaagctgaagcggtttagcgccgagttaactcatcaaatatggctctctttcttccattccacaagtaaaatctcacctgttcctgtcctgtctcacaaaacagatttgttgacaaaaagtgacaataaaatgtgatttaaatcacgcattttgacattgggcgaggtatgctgagtttaccaagacgggaaagacaagaggtaaaatttatgacaatgaacattaccagtaaacaaatggaaattactccggcaatccgccagcacgtcgcagaccgtctcgccaaactggataaatggcaaacccacttaattaacccgcacatcatcctctctaaggagccgcagggttttgtcgctgacgcaaccatcaatacgccaaacgggcacctggtcgccagcgcacggcacgaagacatgtatgccgcaattaacgaattgatcaacaagctggaacggcagctcaataaagtgcaacacaaaggggaagcccgccgcgccgcaacgtcggtgaaagaggctggctttgtggaagaagaagagtaatccttaacttaagcttgtgtcatgccacgcgccttcgggcgcgttttttattgacagagtgaaaacagtacaggtactgtaatccccactaactcaaggaattcatcgtgaaactgatcccgtttttcttcgcattcttttttaccttcccctgaatgggaggcaattcgtcgtgtgataaagaatgcgaagacgaacaacaaggcctcccaaacgggaggccttttttattgataatcaataacaagaaaggcaacacatatgaccgaggaaaacccattactggccctacgcgataagatcagcgctctggatgagaaactgcttgcgctgctggctgagcgccgcggcctggccgtcgaggtcggcaaagccaagctggcatcgcaccggccggtgcgggatatcgaccgcgagcgggacctgctggaacgcctgatgacgctggggaaaaaacaccatcttgatgcccattacatcacgcgcctgttccagctgatcattgaagactcggtccttacccaacaaacgctgctgcaacagcacctgaataaaattaatccgcactccgcgcgggtggcattcctcggacctaaaggttcatattcgcaccttgcggctcgtcagtacgccgcccgccactttgaacagtttatcgaaagcggctgcgcgaagttcgccgatatctttgagcaagtggagaccggccaggctgactatgccgtcgttcctattgaaaataccagttccggcggcatcaatgatgtttacgatcttctgcagcacaccagcttatccatcgtgggcgagctgacgttgcctatcgatcactgcgtgctggtctcaacgtccaccgatgcgcaacagattacgacggtctacagccatccgcagccgtttcagcagtgcagccagtatctgagccgctatccgcactggaacattgaatataccgacagcacctcctcagcgatggaaaaagtcgctcaggctaaatcgccgaccgttgccgccctgggcagcgaagcaggcggagcgctgcacggtttacaggtcctggaacattgtcaggcgaaccagacgcaaaacatcacccgcttcctggttctggcgcgtaaagcggtggaagtctccgatcaggtccccgcgaaaaccacgctgttgatggccaccggccagcaagccggggccctggttgaagcgctgctggtgctgcgaaaccataatctgatcatgaccaagctggaatcacgccccattcacggtaatccgtgggaagagatgttttatctggatatccaggccaacctggaatcactgccaatgcgcaaggcattaaaagagctggccgagataacgcgttcaatgaaagtgctgggctgctatgccagcgaaaacgtggtaccggtcgacccggtttaacgttcgataaacggcaatttcttcatccctgccacggcgactggcagggtgaagatcgcgccggaaagcggatatttcgccacttcgttggcatccatattctcccgcgtggtggtaatgtagagcgtcttcatatccgctccgccaaaacagaccatcgtcgggcaacgcaccggtagacgatgctcctccagctgctcgcccgtcggcgagaagcgcgcaatacgccagccgtcaaacatcgcgctccagtagcaaccttcagcatcgatggccgcgccgtctggaatcccctctcccggctgaaagcgcaggaagacctcacgtttacccgcctcgccccgctcatcgagaggtgttcgatagataacggcatttggcgtatccgaggtatacatccaacgtttgtcttcgctaaacgccagaccgttagcgccgtgaatatcacactggataacctgcggggagagatcgttatcgatgcgcactaagagcgcgccgttaaaatctcccggcccccagaaagtcccggcataaaagcggccatcgcgatcggttccaccatcattaaagcgcgctaattgcgggttgctggggttatcgcagactttgcgctgtagaagaccatgcgcatcagtgagccagataccgctgcgtaaagcgacgataaaaccgcccttctcgcgcagggcaaaacagccgggctcctcgggaaattgcagaacctgatgttcacccgtctgcacgtcgtagcgatgaatctcgcattccataatatcggcccagtacaatgcctgttcggcttcgctccaggtcggacattccggtaaatgcccggtgtaatcaaacagcggttgtggttcagccatcgttttcatccctataaaaaaagccagcgggtcacccctctggctttattgtatacgtgtttgacgacttactgccgattatcatttgcctggcgcagcaacgtccggctttcgctctggaagcgctgggcatagtcaccgaaccagtgctcaaccttacggaagctatcgatgaacgcctgtttatccccctgctccagcaggccgatagcttcaccgaagcgctggtagtatcgcttaatcagcgccagattattttccgaggacataataatgtcagcatagagctgcggatcctgggcaaacagccggccaaccatcgccagttccagacgataaataggcgacgacagcgccagaagttgctcaagacgcacattctcttcggccaggtgcaggccgtaagcgaaggtcgcaaagtggcgcaacgcctgaataaaggccatattctgatcgtgttcgacggcgctgatacgatggagccgcgcgccccagacctgaatttgctccaggaaccactgatacgcttcgggctgacggccatcgcagtacaccaccacctgcttcgccaggctgccgctgtccggcccaaacatggggtgtaaccccaataccggacctttgtgcgcggccagcatcgcctgcagcggttccgctttcaccgaggccaaatcgaccaggatgcagtccgccggcagcggtggcagctgagcaatcgttgccgccgtgatatgaatcggcacgctgacgataaccataccggcatcggcgacaatctcttccgcccgcgaccagtcgtctttttcaaggatacgaacctgatatccggaaagcgtcagcattttctcaaacagacgccccatttgcccgccgccgccaacaatcaccaccggacgcaggttcggataaagcgttttaaaacctttatcgttttcgctggaataagactcccgcatgacgcgacgcaaaacatcttcgataagatccggtgggaccccaagcgcagcagcctcctcgcgccgggacgccagcatcgccgattcacgttcaggaacgtaaatgggcaggccgtattggcttttaacctctccgacttccgctaccagctccaggcgcttagccagcagttccagcagcgccttatcgacttcatcaatttgatcgcgcaatgcggtcagttcagcaaccatatcatcctcttacgccagacgagccgccagatggcctcgcagatccttatcaagttcgcggagcagtgcatcggtggtttcccaactaatgcaggcatcggtcactgagacgccgtatttcatatcgcaacgcggctgctcagaggactggttaccttcgtggatattgctctcaatcatcagaccaataatggaacggttaccatctttaatctgcgcgaccacggattccgcaaccgcaggctgacggcggtaatctttattagaattcccatggctgcaatctaccatcagcgatggcttcagtcccgcctgagtcatctctttttcacacttcgcaacatcttccgggccgtagtttggcgctttcccgccgcgcagaatgacgtgaccgttcgggttgccctgcgtttgcagcaggcacacctgtccggcctggttgatgccgacgaaacggtgcggcatcgcggcagcgcgcattgcgttaattgccgtggcaaggctgccatcggtgccgtttttaaaccctaccggcatcgacaggccagaagccatctcacggtgagtctgggattcggtcgtacgcgcgccgatagcagaccagctaaacagatcgccgagatactgaggactgtttggatccaacgcttccgtcgccaacggtagccccatattgaccagttcaaccagcagacggcgcgcaatcttcaggccgccttccacatcaaacgaaccatccatatgcggatcgttaatcagccctttccagccaacggtggtgcggggtttttcaaaatagacgcgcatgaccagatagaggctatcgctgacctcttcggcaagggctttaaaacgacgagcgtactcaatggcggtttcaggatcgtggatcgaacacgggccacataccaccagcagacgcggatcgcggccagcgatgatgttggagatagtctggcgagactgcgcgatctgcgcctcctgctcaacgctcagagggaattcagccttcaactgatccggagtgatcaaaacctgttcgtcggtaatgtgtacgttgtttagcgcgtctttttgcatgattgcgatcctgtatagctcgtttgcgatagttattgcctcagcgaggatgacgtaacgataccacacaaagtaaagatttcaatccatattccgtaaattttactttacacatagaaattaaatcgcgctgtatttcattcaatgtgtataaaattatttacatcccatcattaaacgccagtttttccctgcttcctcgaatttcttttacgaaaaatcctagtaagaattatctcaaagcagcgaggctggctaatgacgattttcctcaacaatgctattcttcgcccgggtttcagcaatctgcatcccccacgctatgacaatctgacggaaccgtaatgactgttcttcaccgtctctttttgactttagtactatcactcgtgggtatctctgctgttgcttccggaccgtctgaaaatgttcggacaatcgtttcggggatcgtgacttatactcgctggccgcaattatccggtcctccaaggctctgtattttttcaacatcacgatatatccatagcctggccgaagacgctccggaaatattgccttataaacccgtgattgttcgtaatacacaagaagccttacagacgacctgcgatggtttttattttggcagtgaatcgccgacccaacagtctgaatttacggccaaatatggaaaccggcccctattacttattgcggaacaaaacaccgattgctctattggcagcgctttttgcctgctcatcaacaatgagagagtcagattttccgtaaatctggatgtactgacgcacagcggcgttcgggttaatcccgaggtgctgatgcttgcccggaaaacatcacatgaataaggatttttctcaggccccgcgccccacatttaaaagagcgctgcgccgtatcagcatgataagcgtggtgatctctatgacactggtctggctgttactctgcaccgcttccatatttacactcaagcaatacgcccaaaaaaacctggaacttaccgccgccaccatgggccgtagcctggaagcagcgctcgtttttggcgatagcgcagcggctgaagacacgctggccacgctgggcagacaggggcaattttctcaagcaattctggtcgatggccggcaaagacccttcgcctcatggcataacgatggtctggtcagtcaggataaaatcagcgacgtcatcagcaaatggctcttcccgaaacccacggtgcaaactatcctgcaccagggaaaaattatcggtgaactccgtctgaccgcgctggacagattgataagctattttcttggtatctctattattgtgctcaccggcagcatttttctggcttcctgcatcgccttgctccttacccactcgctgcatcgcggcattgtggctgcgttacagagcattaccgaggtggtacatgacatccgcgaaaatcgccatttctcccgccgggtgcccgaagagagcattgaagaattccacctgttcgcccaggacttcaatagcctgctgggtgaaatggaggactggcagcggcagcttcaggctaaaaacgcccagctcctgcgcagttcattacacgacccgctaaccgggctggctaacagagcggctttccggaatgtcattaatgatctgatgaaggatgaaaccgcccaaagtcattctgcgctgttatttcttgatggcgataacttcaagcttattaacgacaactggggccacgcagccggcgataaagtgttaattgaggtcgcgagccgcctgatggcctttgtcggtaaacagcatcaggcatggcgtctcggcggcgatgaatttgccgttctgttacgggatgttcattcagaaaccgaagttcgggcactgtgcagcgcgttgtccgaacagtttatcccgccgtttaatctacacaatggccacaccgccagcctgtcactgagcattggttacgctttaacctgggaacatacctcagcggaaaatctgcaagagcttgccgatcaaaatatgtatcggatgaaacaccagcgcttacagcaaacgcaaaaataaaaggaatcaccatgatcggaaaatattttgctcctgctttactggccgcactttttcttagcggttgccaggctccgcaaggaaaattctcggcagaacaaattgcagcaatgaagtcatatggctttactgaaaccaacggcgactggttattaggaatatctgataccatcctgtttgataaaaacgactatcatctgcgtgccgaaagcaaacagcaaattcgcacaatggcttcacgtctggcgagcaccggaattacccatagtcgccttgaaggtcatactgataattacggcgaagacagctacaacgaaatgctatcgcttaagagagctaacagcgtggcggatgcctgggccgaaggggcgaatattccgcgcgcaaacttgaccactcgcggactcgggaaaaagtatcctatagccagcaacgataccgcgaaagggcgcgctgaaaaccgccgcgtcacggtggttatcagcacgccttaaacacctattcgactgatttagccgctatcaccgccgttgctgagcgccagcgcagataatcaacggcgagacatagcgcgaggctgctccccatgagcggcagcgccaggcccaacaacaccgcaacaacggcagtcagcaaacgagcgggccacgctaagccaaaccacgcctgtatcaacgtattggccgggttaaacgccgcgcgcgccgggcgacggatccaccacagccggtaccccaccgctatcatcacgcagagtgcgattccgaacgcgataagcagtagctggttagcaagaccgaacaaaattcccatatggaaatcaacgccccagcgggtcagcttagccatgagcggaaagtcggaaaaatgagtgcggtccacgatttgcatcgttgcaccatcgatcgcgacagcatcaacccgggttggccagcttctgtcgatttcatttaccgtccacgcgcgcccggcacccgatggaggtcgaatctccagcttgccggcatccagccccgccgcgcgggcagccagcagaaccgggtcaaaatcctctacgcgcaactgcgccgttatctcccccattgctccatgtcccacatgatgttcggcatgcggatcgtgagcggccggagcggcgctttccagccgggtattcacctgcggcgtcagccagccaaaggcggcacgcatcctatcgacgtgactaccggcccattgcgaccaggttaaaccggtcgccgagaataacaacataccgaccagcagcacccagccgagagaaacgtgcaggcggcggttattctgcacgctgttatttatgcgacgacgcggtcgggtcatcgaccacagcgcaatcccacccagagcggcaacccacatccaggaggctgccagctcgctgtacagtcggccgaagttacccagcagcaaagagcgatgggcataatcaatccactgacgcagcggcaaaataccgctggtgccgtaaaccggcatatcgcctgtcacccgtagcgtcaccggatcgacaaaaattgcccgcgtttccgattcgccaaggttcgggtcaataaacatcactcgggtcgtatcgccagccattatccccggccgaaccgcatgcaggcggaggtttccctgaatggcctccgtcgctacggtaatttgcgcgcttagcggctgtttttccccagtcaacgtaccgtacagagcatcacgatagagccagttttccagctgaggggtggcgacatatagcgtaccggtcagggccgccacaaaaataaacggcccgataaacaatccgatatagaaatgaagacgacgcagcaggttcagccatgccgcgcgcgaggtgcaggtagtcatacttttccttttttaaagcaaaagagaacgttgcgcagtgcgcacattattttttatgtaaggaagaaagcagacggacgcggtggcgcgcgggtgtggggataaagccaggtaaagtcatgccagcgtttcctctccgggggggaaaccggggctcgctggcgtcgaagcatcaggctgagcagcagcaccagcgcgaaaatcaggcccggaacatgagctaacagtacgcagtagccacaggcttcagcatgatcgagcggcacgctgtgcgcgtgttccggcatcgaggcatcggtatgcgtcacggacatctgatgtgatggcataccttccggcatccccatcattgcgtggtgcatgccattcatcggatctttttgcagggcgatggagatcaacggcgccaccacgatcagcaggatcgcaaacagcgccagccatacggcccgccgttgtaatgctgaatgatgaaaaatattgctgaccaccgtccctccccatgaggggcgtattgtaaatgattctcaatggaatggttaaaataaagataaaaaaagggccggcccatcaggccagccctctcattcaggatgtcgcgaaagcgaatcttagttaagacgctctttgatacgagcagacttaccggtacgctcacgcaggtagtacagtttagctttacgcacagcaccacgacgtttgacagaaatgctgtcaactaccggagagtgagtctggaagacacgctcaacgccttcgccgttggaaattttgcgaacagtgaatgcagagtgcagaccgcggttacgaatagcgataaccacgccctcgaatgcctgcagacgttttttggaaccttcaacaacccatactttcacttccacggtatcacccggacggaaggaaggtacgtcctgcttcatctgttcttgttcaagttgcttaataatgttgctcataatttaatctcttatcctgggtaaactgatattgggggcttacgccatcccatcatgtttatgttgctgttgcgcgagttcctttttgaactctgccagcaaccttgcttgctcttcagtcagagccaggttttccaaaagttcaggtcttctaagccaggtacggcccagcgactgcttcagacgccagcgacgtatctcagcatggtttcccgacagcaataccggcggtacttccataccttctaacacttcaggtcgcgtatagtgcgggcaatccagcaatccttcagcaaacgaatcttcgattgctgaagcttcatgacccagcacccccggaataaaccgggaaacggagtcaatcagcgtcattgccggtagctcaccaccgctgagaacgtaatcgccaattgaccattcttcatcaatctcggtctgaattacgcgctcatctacgccttcatagcgaccgcacaccaaaatcagcttctgatttgttgccagttcgctgacgcccgcttgatcaagcttgcgtccctgaggtgaaagataaatcacctttgcgccttcacctgccgcggcttttgctgcatgaatggcatcccgtaaaggttgcaccatcattaacatccccggtccgccgccgtaaggacgatcgtccacggtatggtgccggtcatgagcgaaatcgcgaggactccagctctggatgctcagcaggccattttttactgcccggccagttaccccgtaatcggtaattgcgcggaacatttcaggaaacaggctaacgatacctataaacacaagccaatccccatagtgccgttttttaccgtttattcggagaatttaaaaaccaggatcccagtctacttcgatggtacgagtagcgagatcgactttcttgataacctgcccatcgaggaacggaaccagccgctccttgataccaaatgcatctttcaggtttgccttgatgacgagaacgtcattagacccggtttccatcatgtcgatgactttgccgaggctatagccttccgtagtcactacctggcagcccatcaggtctttccagtagtagtcaccctcttcaagcgcaggcagctgcgatgaatccacgacaatttcgcaattagtcaacagattcgctgcatcgcgatcgtcaatgcctttcagcttaatgacgatatcctgattgtggtggcgccagctttccagctcaacaacctgccactgacccgccttctggataaaccagggctgatagtcaaaaatgctttcggcgtcttcggtggaggaaaacactctgagccaaccacggataccgtaggaagaacccatcttgcccaatacaatcggttcaacaggtgcttgtgcggtgtgttgcttgctcatcatgaccaccgtgacagattaagctgctttgttagcggctttgatcagcgcagctacgcgatcggaaacagtagcgcccaggccaacccagtgagcgatacgatccagatccagacgagttccttcttcggtcgcagaagcgatcgggttgaagaaaccaacgcgctcgatgaagcgaccgttgcgtgcattacggctgtcggtaacaacaacctggtagaacggacgctttttcgcgccgtgacgtgctaaacgaatagtaaccataacatcctcttgtgtgaataaaacaccgggccccatcgaggaacggagcccggtgtcatattaaaagcccgaaaattttactgatttctggggaaattgcaatcagcagttataaactctgctgtggaagggcgactccggtacccttaaattgggtaccggagtataagtcatagccagaatgcgccaaccatgtgtcagaaaagaagcgcgccccggcagaaatggcgaccagcctatcggcctccggggaaccctggcggcatcattcctttcattccgcgcatcatcttcatcatgccgcctttcgacttcatcttcttcatcatgcgctgcatatcgtcaaactgtttgagcagacggttcacatcctgcacctgcattccgcagcctgcggcgatgcggcgcttgcgcgaacctttaataatttccggtttagcgcgctctttcagcgtcatcgagttgatgatggcttccatacgcaccagaactttatcatccatctgcgatttaacgttgtccggtatctgccccatgcccggcagcttgcccatcaggctggccataccgcccatgtttttcatctgccgcagctgttcaaggaaatcggtcaggtcaaaaccgtcgccttttttcagcttaaaggccagcttttcagcctgcgcgcggtcgaccttactttcgatatcttcgatcaacgacaggacgtcgcccatgccgagaatacgggaagcgatacgatccggatggaacggctccagcgcttcggttttctcgccaacgccgaggaacttaatcggcttgccggtgatatgacgaatcgacagcgccgcaccgccgcgggcgtcgccgtccactttggtcagcacaaccccggtcagcggcagggcttcgttaaaggctttcgccgtgttcgccgcatcctggccggtcatcgcatcgacaacaaacagggtttctactggattgagagacgcatggacctgcttaatctcatccatcatcgcttcatcaacgtgcagacgaccggcggtatccaccagcagcacgtcgtagaatttgagcttcgcttctttcagcgcggcattaacgatatcaaccggcttctgacccacgtcagacgggaagaaatcaacgctgacctgctcggccagcgtttccagctgtttgatcgccgcagggcgatagacgtcagcggaaacgacaaggactttcttcttgtgcttttcacgcaggaatttacccagcttcgcgacgctggtggttttacccgccccttgcaaaccggccatcagcaccacggctggcggctgcgccgctaaatccagcgcctggttctcttcgcccatcgcggcaaccagttcgttgcgcacgattttgacgaactcctgacccggggtcaggcttttgttgacttcatgacctaccgcgctttcttttacgcggttgatgaaatcacgtaccacaggcagagcaacgtccgcctccagcagcgccatacgcacttcgcgcagggtatctttaatattgtcttcagtaaggcgtccgcggccgctaatgttgcgcagcgtacgcgacaaacgatcggttaaattatcaaacattgtctctcgcctgaggtggaaacggtcggtcgccgcagcgacacaaaaacggaatgggcgcagtataacacgacataaacgcgaatgtgctgcaacggttggagccagagtcgcgtgacgctatactgcttctctttactatttagtcaacagtcgacacccctatgcctgtttttgctctactcgcccttgtcgcctactccatcagcctcgcgctgatcgtccctggcctgctgcaaaaaaacagcagctggcggcggatggcgattctttccgcaactattgcgttgatttgtcacgccttcgcgctggagtcacgcatttttcccggcggcgaaagcgggcaaaatctcagtctattaaacgtgggatcgctggtcagcctgatgatctgtacggtgatgaccatcgtcgcctcgcgtaatcgcggctggctattgctacccattgtctacaccttcgccttaatcaacctcgcgttcgctacctttatgccgaacgagtacatcacgcatctggaaaccacgccggggatgctggtccatatcggcctgtcgctcttctcttatgctacgctgattatcgctgcgctttacgcgctgcagctggcgtggattgactatcagctgaagaataaaaagttgaccttcagtagcgaaatgccgccgctgatgagcattgaacgtaaaatgtttcatatcacccagataggcgtggttctgttaaccctgacgctgtgtaccgggctgttttacatgcacaacctgtttagtgcggaaaacattgataaagcagtgctgtctatcgttgcgtggttcgtttatatcgtcctgctttggggccactatcatgaagggtggcgcggacgccgggtcgtctggtttaacgtgactggcgcggggctgctgacgctggcctactttggtagccgcgtattgcaacagttcatgagctaagtctttaaggaatcccaagtggaacatatctccaccaccacgctgatcgtgacgctgatcgtcatggtggtcatctccgcctatttctccggttctgaaaccggcatgatgacgctgaaccgctatcgcctgcgtcatatggccaagcagggcaatcgtcaggcaaaacgtgtcgaaaagctgctgcgcaaacctgaccgtctcattagtctggtcctcattggcaataacctcgtcaacattcttgcctcggcgctgggcaccattgtcggtatgcgcctgtacggggatgccggcgtcgccattgccaccggcgtcctgacgtttgtggtgctggtgtttgccgaagtgctgccaaaaaccattgccgcgctctatccggaaaaggtcgcctatcccagcagcctcctgctcgcgccgctgcaaattctgatgatgccgctggtgtggttgctcaacaccattacccgcattctgatgcgcatgatgggtataaaaaccgatatcgtcgtgagcggggccttaagcaaagatgaactgcgtactatcgttaatgaatcacgctcgcaaatctcccgccgcaatcaggacatgctgctctccgttctggacctcgagaaagtcagcgttgacgacatcatggtcccgcgcaacgatattgtcggtatcaatattaacgatgactggaaatccattgtccgccagctgacccactctccgcacggacgcattgtgctgtaccgcgacacgctggacgatgccatcagcatgctgcgggttcgcgaagcttatcgcctgatgacggagaaaaaagagttcacgaaagaagtcatgctgcgcgccgccgatgaaatttacttcgtgccggaaggtacgccgctcagtacgcaactggtgaaattccagcgcaataagaagaaagtgggcctggttgttgatgaatatggagatattcagggtctggtcacggttgaggatatcctcgaagagatcgttggcgattttacgacttcaatgtcgcctacgcttgctgaagaggtgacgccgcttaacgacggttcagtgattatcgacggtaccgccaacgtacgtgaaatcaacaaggcttttaactggcatctgccggaagatgaagcgcgaaccattaacggtattatcctggaagcacttgaagagatccccgccccgggcacccgcgtacgcatcgaacagtatgatatcgatattcttgatgttcaggagaatatgattaaacgggtgaaagtgatgccggtaaaacccattcgcgaaagcgtggccgagtcatagcaaccctgggacctggctgaggggaatagaaaaacggctacctcgcggtagccgtttcgcttatttacttcgctttcgccacggtgaccatcgccgcgcgaatagtacgtccgttcagggtataacccttttgcatgacgcccagaacgttacctgccgcaacgtcttcagactcaaccatcgcaatggcctgatgtacgttcggatccagcggcacgttagtatcgccaatcacttccacgccgaacttgcgcaccacgtcgagcatggacttcagcgtcagttcgataccttcaaccatcggcgccatatccgggttagctttatcagcgacttccagcgcgcgatccaggctgtcgatgaccggcagcagctcgttaacgaacttctccagcgcaaacttatgcgctttttcgatatccagctcggtgcggcggcgcaggttatcttcatcggctttcgcacgcagcaatacttcacgttcgcgcttctgcgcttcagcaagctgagcttccagattcgcaattttttcatcgcgcggatccacctgctcagccgaaacctcaggctctaccgcctcaacgtcgtcgtgctgctccgtgataatttcttccggggcttgcccctcaggcgttttctgttctttactactcatgaatttctccgcgttttttttcgcattcatctcgctaacttcgcttattatggggatcagtttcctggtttcaagggaacgcagccagattgtcactattcatttaacgcaaggacatccagatcatgaagaaccacttcaagtgtataggcattgtgggacaccctcgtcacccaaccgcgctgaccacacatgaaatgctctggcgctggctgtccggcaaaggttatgaagtgctggttgagcagcaaattgctcatgaactgcagctcagcaatgtgaagaccgggacgctggcggaaatcggccagcaggcagacctggccgtcgtggtgggcggtgatggcaatatgctcggcgcagcgcggacgctggcccgctacgacattaacgttattgggattaaccgcggtaacctcggttttctgaccgacctcgacccggataacgcgctacagcagctcgccgatgtcctcgaaggccactatatcgccgaaaaacgcttcctgctggaagcgcaggtatgtcagcaggattgccagaagcgcatcagcacggcgattaacgaagtcgtcctgcaccccggcaaagtggcgcatatgatcgagtttgaagtctacattgatgaggtgtttgctttctctcagcgctccgatggcctgattatctccacgccaaccggctccacggcttattccctctccgccggcgggccgatccttacaccttcgctggatgcgatcaccctggtccccatgttcccgcatacgctgtcggcacgcccgctggtgatcaacggtgacagcacgattcgcctgcgcttttctcaacgctgtagcgacctcgagattagctgcgatagccagatagcgttgccgattcaggatggtgaagatgtgctgatccgccgctgtgactatcacctcaatctcattcatccaaaagattacagctatttcaatacattaagcaccaagcttggctggtcgaaaaaattgttctgattttatagccagcccctttactggataaaaaaccatactatactgtacgaaaacacagtaatggtttttcatacaggaaggcagctatgttggcacaactcactatcagtcattttgctatcgttcgtgagctggaaatcgattttcacagcgggatgaccgccattaccggcgagaccggcgccggtaaatcgatcgctatcgacgcgctggggctgtgcctcggtggtcgggcggaagccgacatggtgcgcagaggcgccagccgggctgatttgtgcgcccgcttctccctgaaggacacgcctgccgcgcagcgctggctggaacagaaccagcttgaaagcgggcgtgagtgtttacttcgtcgcgtcatcagcgcagacggccgttctcgcgggtttattaacggtacggcagtccctttatcccagctacgtgagctgggtcagctgctaatccagatccacggccaacatgcccaccagctactgactaaacccgaacaccagaaaacgctgcttgatggctataccggtgagtatgcgcttactcagcttatggcagagcgctatcgtcagtggcataaaagctgtcgcgatctggcacagcatcagcagcaaagccaggagcgcgcagcgcgtgcggacctgctgcaatatcaattaaaagagctaaatgagttcaacccgctgccgggcgaatttgagcaaattgatgaagagtacaaacgccttgctaacagcggtcagctgctgaccacctgccagcatgcgctgacggtgctggcagacggcgaagaatccaacctgcaaagccaactctacgtcgcgaagcagctggtcagcgagctggttggtatggacagtaagctctccggggtactcgatatgctcgaagaagcgtctattcagcttagcgaagccacggacgaactgcgccattatcatgaccgcctcgatctcgatccgaaccgcctgtttgagctggaacagcgtatctcccggcaaattgccctcgcgcggaagcatcaaattacgcctgaagagcttcctgacctttaccagtcactgctggaagaacagcgtatgctggatgatagcgcgggttctctggaatcactcagccagagggttgtggagcatcatcagctggcgctggatacggcgaagcagctgcatgccttacgccaaaatagcgccgatgagctgactcagctcattacggagagtatgcactcactttcgatgccgcatggggtgttctccattgatgtcgcgttcgatgagcgccatcttacggccgagggcgcagaccatatcgaattccgcgtcaccactaacccgggtcaaccgctgcagccgattgctaaagttgcctccggcggcgagctgtctcgtattgcgctggcgattcaggtcatcaccgcgcgtaagatggaaactccagcgctgattttcgatgaagtggacgtcggcatcagcggccctacggcggcggtcgtcggtaagctgctgcgtcaattgggtgaatcaacccaggtgatgtgcgttacccatttaccgcaggttgccggttgcggacatcaccatttcttcgtatgcaaggaaaccgacggtgaaatgaccgagacgcatatgcaccctcttgataaacgcgctcgtttgcaggaactggcccgactgctgggcggtagtgaagtcactcgtaacaccctggcaaacgcgaaagagttgctcgccgcgtaaactttttgattttcacagagtcatagtgaacagcaaattgccgacagacctgcagccgaaggttcccaaccgggcaaaggtctattatcatcggcatattacagatgagccacgtactgctcgggcccaaaaaggaatcaaatcactatgcgctgtaaaatgctgactgctgccgcagcggttcttcttatgttgaccgcaggctgttccactctggaacgagtggtttaccgtcctgacatcaaccagggtaactatctggcaccaaccgatgtagcaaaaatccgcgtcggcatgacgcaacaacaggttgcctatgctcttggtaccccgatgatgtcggatccgtttggcaccaatacctggttctacgttttccgtcagcagcctgggcatgagaaagttacccagcagacgcttaccctgaccttcaacagcagcggtgtgctgaccaacattgataacaaacctgccctgacggcggagtaaatctatcaatacgcaaaaagcgctcaatgagcgctttttttatatctgcatcttcgtgcgaaacggttactttccggcgcttttctctgcccgctggcgacgcagctcttttgggtcagcaatcagcggccgatagatttctacccgatcgccatcgtggacccgatcgtgaagcttagccgggcggctataaatccccactttgttcttcgccagatcgatatcatcacgcagcgccagaaggccgctggccacgatcgcctgctcgaccgtcgcgccctcctccagcttaacgctttgcagatactgcttttccggcaatgcgtaggccacctcaaccacgattttagccgacactgtagacctctttagcgcgggtcgtgaacgcctgcaccatattcatggccagctctttgaaaatgcgaccaaaggccatttcaatcagcttattagtgaattcaaaatcgagatgaaactcaattttgcacgcttccgggcttaagggaataaacttccagccgccaatcagctttttgaacggaccatcgaccagactcatcagaatactttggttactggtcagcgtatttcgcgttgtgaaggtcttactgatacccgctttggagacgtcaaccgccgcggtcatttgcgtcggaccgagctccagaacccggctaccggtgcagcccggcagaaaatcagggtaggacttcacatcatttaccagttggtacatctgttccgcactgaacggcaccagggcggtacggctaatctgaggcatagcaggttccacatataaacacggtgtaaataatatcatttatctgctgctaaaaaaaacgctgtaccgcaactcgtgctaagatagcccattacgcctcgcgggaagattgaggtacgactgttttaagacgatgacttcaggatactatgactaagaaaaaagcccacaaacctggatcagccaccattgcgctgaataaacgcgctcgtcatgaatactttatcgaagatgaatacgaggctggtcttgccctgcagggatgggaagtaaaatctctccgcgcaggtaaagccaacattggcgatagctatgtcattttaaaagatggcgaagcctatctgtttggcgccaactttacgccaatggccgttgcttccactcattacgtttgcgacccgacgcgtacccgtaagcttctgctcaaccagcgcgaactggataccctgtacgggcgcatcaaccgcgaaggttacaccgtggttgctctttcgctgtactggaagaatgcctggtgcaaagtcaaaatcggcgtagcaaaaggtaaaaaacagcacgacaagcgtaccgatatcaaagaccgtgagtgggcggtagataaagcccgaattatgaaacacgccggtcgttaattccccttcctgtcagggtcagttttgctggccctgatgctatatcgttgttgatgctgatttttcacccaatctgacgccataatcctcaaaacgaggactggtaagcacattcataaatctgttatactcaccgtacacattggggctgattctggattcgacgggatttgcgaaacccaaggtgcatgccgaggggcggttggcctcgtaaaaagccgcaaaaaaatagtcgcaaacgacgaaaactacgctttagcagcttaataacctgctctgagccctctctccctagcttccgctcttaagacggggatcaaagagaggtcaaacccaaaagagatcgcgtggaagccctgcctggggttgaagcgttaaaactaatcaggctagtctggtagtggcgtgtccgtccgcaggtgccaggcgaatgtaaagacagactaagcatgtagtaccgaggatgtaggaatttcggacgcgggttcaactcccgccagctccaccaaaattctccatcggtgattaccagagtcatccgatgaagtcctaagagcccgcacggcgcaagccctgcgggcttttttgtgccttgaatttgtcccgcgaagtctgatgccaactaattaaatccgaaccttttaggcaccttgttaggcacctcgtaaagctttattgttttcgaggtgcctaaaactatggaaacccggcaatggcaagacaaaccaaacctctatccgttaaggaaatcgaatctgctaaacccaaagaagcggactacgttctctatgatggcgatggccttgagctactcatcaaatccagcgggagtaaaatctggcagtttcgctacattcgtcctgtcaccaagaaacgagcaaagaagagcataggtccctacccgtcagttacccttgccgatgccagaaactatcgagcagagtcacgctctctcctggcgaaacaaatcgacccacaggaacatcagcaagaacaacttcgcagttcgctggaagccaaaactaatactttccagctcgtggctgaacgttggtggaatgtgaagaaagccagtgtgaccgaagactacgcagaggatatttggcgctctcttgagagagatgtttttcctgcgattggcgacgttagcgttacagatattaaagctcacacactggttcagaccgtccaaccggttcaggccagaggagcactggaaaccgttcgtcgcctgtgccagcgcattaatgaggtcatgatctatgcccaaaacacagggcttattgatgctgttcccagcgttaatatcggtaaagcctttgagaagccgcagaagaagaacatgccaagcattcgaccggatcagctacctcaattgatgcagacgatgcgtacggccagcattagcctttcaacacgatgcctgttcatgtggcaacttcttaccatcacccgccctgccgaagcggctgaagctcgttgggaagaggtagacatggaagcgcgagagtggaagattcctgcagcacgcatgaaaatgaaccgcgaccatactgttccattgtcagatgaagcaattgcgatactggagatgatgaagccgttaagtggtaatcgagaatttatcttttccagtcgcattaagcctacccagccgatgaacagccagacagtgaatgctgcactcaagcgtgctggcttaggaggcatactcgtatcacacggtttacgttctatcgctagtacggcactcaatgaggaaggattactgcctgatgtcattgaagcagcactggctcatgtagacaaaaatgaggtacgtcgcgcttataaccgcagtgattaccttgagcaacggcgatcgatgatgcaatggtgggctgattttgttatggctgctgatcgcggaagtatgattgagggaggtatgaggggagagcgtttagcgggatgacggataattaatgacagttcccactttagtagtgggccagatgagaatttatatttcaagcgaaagctaatagttttagaaatcaagctaattagcataatatctcttaattgaagggatatggagccgcagaaataaatgaagacacggcagtatgcgcaaaaatcaatcttcgatctggaagcaatcttcgagcagtccagcaacaatgttagcgaacttgaacagttgttgagcgagctgacctttcgcaacactgccagggcgcggacgctgacggctaaaatcgagcaatctctatttgcacttagcggccacagcgtggtcgccatgtcggcttccagcccatcaacacgccatcccgattcggtgtccattcaatcttctcgagttgtgccccacaattcgcctgctgcggaagagcaactgcaactgaaggccatcccagactctgccatacgagagcaattcgacaaagaccaaatcgaccttggtccgatcccgtctttttctccatcaggtaaggcgaatgatgcgcgagcaatactggcagcatggacagccctcgaagcactgtcgcctcaaggttataaacgcccagaggatatggcaaccggcgaccgctctagggttgctctattggagcgaggtgttccatggggaccaaatgcccgcagcaagcccagttataagctttatttcgaggtcatcctcggctccatcgctctcgacaaggcgacggacgagctggtcaaggtttttggcgaggatgaggagcgttcacgcccggacggtaagaaagcggccatcggctcgatcctgatcgacaaagaaggctttgtgcttgagaacaaaggcgttgccgtgtccagttttgcctgggcactcaagccggctctcgatctgaagcttgggagtttagggaattggccgaatgttgagccgcgcattatcgagcatctggatcgaatggttcgccaccacaacaaagatggagaacccataccgatcgatctgaatgttgttcataatgcttataaatggcttgtatcgcagttcagtgtacccgagcatttggttgagccccccacattcgcgattaaggtgtttcatcatttcaaggctaaggcgccgcctgaaccttcgttactgaattccttctatcttgaagatctcggtgaagcaaccaaattgctcgagacgggcaaagccggaaccggtttgcgccgctacatgggaattggcagacctgaccagaaaattgacgtgctatcgcccatttccgcagttgagccgctcgtcgcaccgtcgctcatgccgcaggctcgttggccttcgaaaggcggccatccactggtgctgcttcaacaggctgctgtgaatgcggcgcgtgctgagctgaatgatgctccaggtatcatcggcgtcaatgggcctccgggaaccggaaagaccactcttctccgggatatcgtcgttggatgcattctcgatcgggccacggcgatgtccggcttcaacaaaccgcaggatgccttttccacaacaggcgagaagctggcattcggttccaatgcattcctgcacttctacaagttacatgcatccttgaagggccatgagatcgtcgtagcctcctccaataacaaagcagtcgaaaacgtcagtaaagagcttcctctcaaggaagccaatggtcgccatgaacagatcgcctacttccggtccatcagcgacctgattgcgaatcccaaacgcgccggctatttcgaagccgaggccgaggggggcatcccctccgacactgtcgaaacctgggggttgatcgccgcagctctcggcaagagcagcaaccgcggcgcgtttcagcaaggtttctggtggaatgaagacggtggtttccttacctacctgaaagcagctcgcggcataaatgtcatgcgtgagatcaaggacgagcgaactggcgaaaccatcgatcgcgtgatgcccagcgtggttgtcaatgagcggcccagcaccaacgaagcggatgctgctgcggcctggcagaaagcgcgaaccgcctttcttaaacttaaggagacgatagacgccgaaatcgccagcatcgaagagatgcgacgggatatccaggcgctcaagggagcgatcaccgaacttcaaagggctgaacagcgtcgaccgagtctgaatgaagccgtcgaagaagcacacaagactgctgaatcctgccaacgagagcatgagaaggcaaaatcgcagatcgagcaggacaagatcatgctcgacagccatcttgcttgccgtccaggtttcttctcccgtttgtttgcgactgcggcctggaagtcgtggagatcgacactgcagaagctctcggcgaccttgcagcaatcagtcatacgggcgcaggggacggacggtgccctagagcttgcaagggctgagtggagcaatactgagtcccagttacagcaactcgaccaggaaatttccagcaaatgtcaggctgtctcgaaattgaaggcaaccgaggcacaggcacgaaaccgtatgggagacagggtcgttgatgagaggttcttcgagcgcgagcacgagtctatccacctcactgcaccatggcttcccgatgaggttcatcgcctgcgggaggatcttttcgccgctgccctgactgtgcataaaacgttcatcgatgcttcggccagccgcttgcaacacaatcttgggttattgatgtcaggcatggtagctggtgccttccagtcttccgctcaccgtgaacttctccccgacctttggtcaagccttttcgtggttgtgccgaccgtgtccacgacattcgcctctgttcggacgatgttcggggatctgccaccagagagcattggttggcttctggtagatgaagcgggccaagccgttcctcaggcagcagttggagctatcatgcgggcaaagcgctccatcgtggtaggtgacccgttgcaaatcccacctgtagtttcacttcctgaaaagctgaacgccgaaatctgcaagttctttgacattgaccaagtcgaatggtctgcccccgcagcatctacgcagacccttgctgatcaggcatcgcgcttcaaatccactttcgtcatggacgtaggtgatcgagaagtcgggctgccattgctcgttcacaggcgttgccagaacccaatgtttgatgtttctaactccatcgcctatgccgggcagatggtccatgctgtcgggcctaaaaaacccggatctatcggctcggctttggggagatctcactgggtggatatcaatggcgatgctgagacgaagtggtgtcccgacgagggcgaagcggttgtgcgaatgctcaaagagctggcagcatcgggcattacaaatccggacgtatttatcatcacaccattcaagatcatagagcagaacatgcgtcggcgtctcgacagtgaaactgatctgcttcgaacgttcggcgtaaagctggatgaatggtgccgtgatcgtgtaggcacaatccacacgttccagggtcgagaggcggacacggtaatcctgttgctgggtgcgccgaaagcgagtcagcaaagggcacgtcagtgggcggcaagcccaccaaacataatcaatgtagccgtctcacgcgccaagcaaaacctgtatgtggtcggctcggctgctgcatggacaggggcgggaactagccttcaggtcctgcatcggcaattggcgaaatcagcctaacaatctccgaggtggccctcattattgagggctcatcgcgactcattcttggctaacttcagtaatgggctggccgctatgtgttaaaatctgacattgctcacataatagtcaagcagtcacttttcaccgcccatccaagcttgataattcttaccgctccccttatatccacactgaggaataacctctgacatggctaaggagtatgattatggggcttaaacctggtccaaaaccaatcgcaaaatcaacaggaaaacccgatcaacgcagacgtgataataaggatacacccggcaataccccaggactgaaaccaagcaaatcaactgggaagtaatcgttcaagggtatggagaattcatctatacccttatctcatcaaatcagtctgctttagcccgtttagtgccaggagcggacgttggcttgaagcgtctcttttctgtgatgctcgccaagagtagcggatctataaaaaaacactctatccggtataatctctttcatgttttcttttcggtatctaacaccatgagcatgtcagcattacaaccgcagatagttaaagcaatgaaaccaaaacatggaaaggattggatgttagtccgtggagacacggttttcgtccgctttttagctcaaaatgatgatggtaattcttttgaagtgcagacaccaacgaggcccgaagagagaattcgcactgggggtggtttgactgtcggatacaagctgccagtaaaccagaagctccttttttcggtcgctgagacgttagcccaagaaaatcatcttcaacctgagaaaaaagtagaccgctttcagaataattgcatctccatgttttccattactatagatcaaggcaaaactatacaagatgaagtcaacgaggaatgggtcactcgcttctttgaactctacgatgctcatggaatttcgacgaatattgtcgaacctagcatggtcgatatttattctgacctatgtgttgaggatggcgaagacgtttatctgagtgatggtatgtacatgcgcccagacgggacaacttacgaacgttgataatgtaggtgcgaaagcataaatcaattcccggttgatagctgggatatcacttaaccatatccgataattagtccaagtagcccaacatttcaggcgactgctcgtattcatgaccactctatgagttagttcgccgccacgctctggacttatttctctgctttcagacgatctactatctccttctctcttcataaatagacaaaagtccgctcctcgctctcagcagacctttatcggcaggtacttgtctgctgtgtgccagaagcagatattattatataattctttaaccaatggatgagaaaaaattctggaacttattaaaacttcataactttaaatcacctcattcattaatgaatgattaactgtatggttaaaagatcaaaacttattttttattattaacttgttttgctaaagagctataaaccaaatcaacgaaaacatatttttcgcattcccaaggttcactaattgatgggtttactaaatcgggcttcccccccattagactatgtatgtgcgaataaataccaattctttctgcgagttgcattagtttcatttgatgttctggtgggagcatcttatttctaaaccatgttgtaaatatatgcttagtaagttctttagtacatataaaccattcgccttgacgtctttcgttgctaaatttttcatgtagataattttctttttctgatccgccaggttccaaagcgtgtaatattaattgaccaaatgtacctgtttgtaagttagataatctttttagcacattattggaacgtcctattttcacataaagccccgaataaggattatttttatctgaagaaccggcccaagtatcaggtacttgtaaaatataataaatactacttacttttccactcgatacactatttgcccaagtttgccactcttccatccagctatttgcatcttccttcgtgtcaaaagtgtgacttgtatagtataattcaccactatccaataacatatcgaaaacatattccccactctcaatcattcttaagttgtcggttctcatggaagtatctcataaatttacagggatatataaaatggactttactacacttattaagtgatatccatttttattgttccaattgcagtgttctcatccattatgttaccacctgattatttcattatttaatttaaacaacttattgctagtgataacggtttgatgcccgcttctcactccaatctaactttcagaataaatttgatctaaaatatttcaaataggccgtcagtaaatatggaccatttttaatcagttaggggatcaatctgattttctctaataagatttcgcaacgcagtacgagcagcagcgatttctgtcatcccattaagaaccacgctggactgtcctcctctcaccccaaagactgtaaccatattctcttcacagaaatactcaccttcatactgcaggccatctttctctactcgaatgtatgacataacaacctcatttaaggatcttttgtttgaatcatatccccacaaaataatttaatcaatctcacccaaaactacacgcgatgcttgtcttgtaagcactgcacttaaccgaaccattcgattttagagatcctgcgtacagttcagttatgcttgtaaggctaatgtccactcctcgctcaaagcagaccttatgacctcgatttctggcagatccgagccaagagcaaaaattgatatcatcaatcggcctcaagcttaaggggaacatctccccctttttgtgtaacctgtttactgaagatgttctttcagccaggtacacgcgccttcaatgtcatacgctttttccccaaatcctttcgcaagcagaaactctggtaaatattcatcatatttatctaagtacttttctggaacatttacagcaagatcaaacgctgagggcaagtctgacaacagcaggcctttaagggcctgttgaacagaagtgatacttgagccgtcaatttctataactccagccaatgaattagctttaaagccacaacgtatgagcaaggctgtaatcgtattgacaaccttatctcccatccatgggagtatgtaacagtattggccgctcgtaagaaaatactcattttgcaggttataactctggaagttacgactgccttccgcaaataggcttctggcggcagaatcggcataatctactctctcgctacctattgctatgcggtaatcaccttccctatagatagcgagcatttcctgacgaacggcatcatgaacagacattccccctccactaaattgtggtggctgaccgcctttggtcgcctctacatagataacttttttctctgtctcgatctctgtcactctccagcgccgcccaccgaagatgatgtgttgatctggtagcagtggggagtccacaggcactgttccaagggttctgtttccggtgacaatgcggaactcttctggtgtgttgaacacggcataaaacgtgtaatggttagtcagtttctccccctctgccccaacaaccatttctccactagcgagttgagtgagcaggccacatgcccccatatgtttaagcaggcttttgaaatcgcctatatccacattacggaacgggcctgtttgacatagctgtgaccagagttgatcggcacgaactccgccccattgcgcggtaattgcaagaatctggtgtagcagcgtggagtaatgcatctgctgggaatcggcaggctcaaaccattgtttagagatcatcaatctgatcattgccatcgactggaccaaatgcagccgtaggtggtcaacgatactgctagtcacagtgagttcattttctgtaattagcattcttagaactgatgggcagtcgcgccgcccagaacgtcccatacgctgacgcagactggaaacagtatgcggaggcgtaacttggataaccgacttaaccttaccgatatcaattcccaactcaagcgtcattgtacaaacagctgttgtgggcaaatttcctttctgaagacgagtttcaagcgcttcccgcaattccttggcaagggaaccatggtggggaaagaattcattgggaacaatatgttcctcacacatgtcgctcagcgtggcagcaatgctttcagtccgctttcgactgtttgcaaagaccaaatgagaatcgccacggcaaagtctaaaaatgtcagcgcaaacgtcatgttcagctgaactctgaagttcttcttctttttggagcactcgctccagataacctttgacctgtacctgaagagtggcctcgctcttactatctgtaacagttacgcagggtagtcgtttgtccgggcgcaaaagttcgggcactttctccagttcccccagcgtggcactcaacgcaacgcggggaattggatttatctggcgtcctagcacatggtcaattctattgagcagagaaagcagctgtacaccacgctctgagccaatgaaagcatgaaactcatcaataacgatgtatgcgactgacgaaaacgcctgtttgagccagcccattgaatttatgagcaaagactcaagtgactcaggtgtaatcagtaaaatgccagcagggtttgtccgagccttcttctttttgctttgtggtacatccccgtgccaaggagtcactggcatttccaatgcatctccaaggctctcaagacgacggtactgatcgttaatcaatgccttcaacggactgatatagacgatgccaaatccattagtgagatctgcaactgccgaacaggcaggaagaaagaaagcctctgttttacccgctgctgtgcctgcactgattagcacgtctcgatcacgggctaaaattgccgggatagaactctcctgcaagggccttaatgttgaccacccctgcttgtaaatccacttacggacgcggggatcgagactatcataggcactgctcataatttgaagttcgccagtccgtcatcgtcatcgctttcctctataatggcgtcatccatttcgctgggcctgtcctcttcaatcgccacaccctcgattagtgtttgccagttcatcgttctgttttgttccagcacagccagcatgtccaggaaaccttttatggtattacggggggtacggaagtaagcgtctccaatggttttactacagtgatgcagaaatccagtcagtgcctcatctggaaccagataattctctggatctccgcctgcataaacatgacgaagatttctcagtaaaatatacagttcctcaggggtgaggctggcaagatgcaaagtgggagacgagtagtcaatcactcctgctttttgcgcgaaccgattttccgccagacgtgattggagcgcctcatagctgtaaagacctttgcgcggatcgaaaaggaactctggcgtccccccgaggataaaaccaatattctcggctgagccttgcaggcagtcattcaggatccgcaaaatctgttcgtagttcgctgttcttgcttgcgtattattcagtttaaagaggttcaccatttcgtcgaggctgaccaaaagaccggcatagcctgcctggcggacaaaaaggctcatcagctttaaagagtcatagaatgaagcgtctgagataatagtccgaacgtcgagatcgttacgggcatcagttttagtggtgtactctccccgcaaccagcgaatagcattggattttagtgtttcgttatcctgctcatgcccgcgccagaatgaatcaatgaccttcgcaaagtcatatccgccgaccatatctgatagtgctgccaggcgtttatgaataactgatgaaacctcggagccgtccttgtcagcttccttccttgcctccgtaacgaatctttcaacaacgctaagtaacgcattaccatccggcttgtttctggtggacatgtttttcataagctcagaatagagattacgagcctgacctcccgatgagtgaatgcgtctgtcaggagaaaggtctgcactgattgacaccagcttcttctctagcgcaatagagcgcacaacactcagaaagaacgttttaccagaaccatattcaccgatgataagtctgaagcttgcaccaccgtcagcaatcctctcaatatcctggtggagagcggtgatctcattcacgcggccaacctggatatgctgaatgcctatccttggcgttacacctgacttaagtgactgaataatagcgtcgcgttctttcactcttatacgtgttacagacattcactatccctctaattctttggcaatttccaggtcaacccagatatcatcatcggcatcgtccagtaccggagcatcaaccaccgcataggaccagtcattaatcacctcaagcgcaccgccgagcatcaaattcaaatttccgcacaattctgtcgcctctttccgggaccactgttctttctccagcaaactgcgataaagctggctatgtgcggagtctagcccccccgcctccgttaatgaggctggagcgctttctggctcttccggttcttcttcggtgaaaattgtgttcagcaatttacgaacatcatccgtggcagattcgtggcgggcaagtacattagcatccagtgtgaaccctactgctggctgatcagttggtacagacgagacgagatcatgttcagttgcggaatgctgatggatattgctcgagacagatgagggatccagccccaaaattgaataaatcttctcaagctgtttgatttcggcaggcgctattgtcctatccgaacaggcaacactaacgataactttacccacagcagctttttccgcggcccccatcaactcaatcctgcttttcattcctgtcatattggctggggtatgaagttgccacgttaaatacgcatgtagagagcatttttcatcatcggtgaagccagtattgttgttgatggcattctcaagcactttctgttcagcttgatcaagagaatcgtcaatcaaggcgaccatcgcccctaatctgagcgtcattactgctgagataaattcagaagaaggtgagaagcgcccaccttcggcggcagggaatagaacaagtgtcccatcaacatccgccttcacatggtgataatacgggtcaggtgccagaccgtaacccatcttcagagcaaaggcctgcatcaaatcggcctcttttttattgattttattggggcaactggcattcatatgtgcccaaaaatcagcaactgagactaacccctccttgacgaggatcgcctcatcagcccagcgtttgaatgagcttaatattttttctgcgctttcattaacgatctctgaagggagcaacataattgcagccgtatcattgactgacgtacctttcctacctaggtagcgactataagcatcaagttcatccgtacatatgtcggcaagagccataattttctggacagggctcttcaacgcacttggatcaggcaggtcgggaacagggagtcgaacacctcgcaaactaggacttgctggtgtgtaatctaaccttaggcgcgttttattcgccttaacgaccatcccttcaccatatttgagggtgtaacgccgtttgaaaagcgcagcaaactctttagcacagcggcgagccggggtacgcagcgaatactcggtgtggtttattacccagttcaacgccagttcagctgatacaggaactccttcatgtacagtttttgccagagccagcttaaattgcatgctgttgctgaaacctgaattgctatcgagctcagtggctaagcccatgttcgggcgcagaatagacatggcttcgagtaactgggccgaatatccacggaatgagcggttctcaatgaatacggatcttaaccgagctacttcattgaacagattacggaactcagcatcagggaattttgggtcagtggaatctatgagcgcttttctttccaggccgtagaggtagataaaaacatagccgataggacacgatggatcagacctatcgctggcgagccaactgacatacgcaccgcgtgcttctggggaaagagaggaaaaactgggccagtatcctaatgaactgtcctcgtaaagataagaagtaggttttatcttacatgtgtcatcaattaatgatgcctcatttccatcgtcataatagccgcctgattccagaccggagggcttcatacgttgccccaagtaaatgtggccaccgctaattgctacaccagctacagttatcatctcacccggaagtatccatcgagctagtgcgcctgctgactttgaggtgttccggtaatgattggttgccacccgaagttcaacaccccggccaccgctcaatgtaaaagttgcaaggttatcgtcttcactatcatcgtttcgcacaaccgcctcttttttcttgatgtcagcgagccattcttttggcggtgctttcacggggcttgaagcataagactttggagatttacgttttttctttctaaaaaacaacaagtaaattactaaaatcgccgccagaaacttcaataactccatgatatataaccttaaaatcatcctccattcacatttgaaatgtggtagggaatgcatggcaagtggattaatctcaaaataatacgtctaaatcgctatggttaaaagcaaatcgcaattaaaattaactaattgatttaaatgacaaaaatcattgaataatttacttcaccagaagtgaatttttaaggagtaaaaaacctgctgggccattcgcctaagaatgatgttgtactaatgctaggttaacatacgagcaaatatactgaggatgcagaactgtccactgtacgatgacatttacctattcgttgagaatgtcggtaactattggaaagccgttagagactgtacattctcggattttaagagtagctggttaagttttgtgtaatagctgcgtcaggtcaaacctgatctatgagcagatatagcgaggggccccacgctgatttttatcaactaattaagctatgagctgagttgtgccgaagttaagatatcctcatcgcctacgttgatgagctgaagagcatctctgacgccattaatgcagtttatccggagagcggattaagttctgtatcattcacatggtgcgtaatagcctgcggctcgtatcttagaaggactacaaagcattaacccatgacctggggtacctgcggcagaggcggttttacacgacgaataccattgccagattggacagtgtgatccggcataccattaaaaagtgcaaagtactcccgacagattactcattaaaagttgtatcgctatcaaccctgtcagtatcgctaaaaagacgatgatgttcaggggagctcgtatcgtcttattatcagctctatgctcttctgcacagccacatctgagaaaaggcagtcgcattgaatcacgtacgcgctctcaaggtaccggactatcgattttgcgacaccccgatacgtttttgtactgccttcgcgaacgccgccttcactcttttgtctttgactgaccattcagccaacaacttgctctggcttgcctccaccattgccgcgtcccgtgagtcgtttttatcctgtgcggaaggccatccatgctcctcaatatagggccttaacgctttaataattgcgttgatggtatcggttttagtttcccagccctcaggttgcgcttccaggtgttttatcacttcgtctttaatctttaaatgtgtgtgttgcattatgcactcatatctaccgtagtttttttgcgcatacgtgctaaatggggatcgtttatagaattatgctacgcctatttcttaagcagcatgacagacagatttaagcgaagagtagatcaatctatccgaaataatagctactatcagattgtaagtaacaacatcttattagtaacgatgaatgaataaaatacctcacctattttttataaaaaaagtcgcatactcctcctgcgtttgattcaatagtctcaacctaaactatccatagaaatgtgtaattgagaaatcatgacagaagactccaaacgcggtagcgcattaatctgcgctttaaaatctgacgaggtagtcgagctgagcaaggaatacgctgagcttagcattgacgctttgattgaatcaaaaacgcttgaatctatcccttttgttagcactgtggttggagtatacaaagttgccagttctgtcaggagtcagctatttactgaaaagatttttcgtttcctcactcacttctcagacctacccgatgctgaacggattaaaatgactgaaaggttgaatgaaaacgataagtttgctggccaggcaggtgcaagactgattgaaatcatcgaccggatggaaagcgaaagcaagcctgaagttgcggcagaatttctcaagtcattcgcacgagaagagatagattttaatgttcttcggcgtttgctcgttgctcttgaacgtattccctcatttgatatcagtgaactggcggcttttgttgccatcgaccctgaccaaccagtggaaatggatgaggcctttttagatagtctagttaatgctgggttgggaaagaacaatggggcatggaaaagtgtaattgttcctacggagttatgcataacttttgtgcgcgcaggaaggttataagcaacctagctttttattatcccagaaacggattgtcttactagtctgtgtgctagttgtcgcagcataataacagaaagtccgcttctggcactaagcgaacaagcttacgaagcctaaggttcgatatgaacgagaagcgaaagtcagttgtatcatcgtctcctgtattcataggtacacctcgctttattttgctattaattgataaatagtgatattacatttaatggatgcaacctaagtacacttccccaaaggtttttaatgccaactgactaaattcagttgttaagtttttcgacaaaaccaaccctttgttaatagttttaaatgtggcaaactcaggcatctcatccccgagaggttcattttccctgagcatagactgtcgaagcgtagcaaaaagctcaaatccaagaggggcttctattgggggctcatagccgcagtcgtaaccgtaagttaagatttttgcttttccagttattgtttctctaaacctaacaccactaaaagatgccaccaaatcagcaagttgtatcccacaaacttcatgagatgagcatgttataacttttacttcatcagaacatagactgagagcttctgtagagtttatgataccttcatcgaaaaaaacattccctttcccatctggaaagttcttaatcaataagcttaataaaaatgacacatccgaataacaacaatggcgatactcacttggcataataaatgatccccatcgacaatttgagttcaagtaagaaataagtttacacctcaaatctcttaaagattcagattgatccattcttgcgcatgagtgatgttcatcaactgaatgctctgaaagaattttgtttatatcagactgaggatcttgatcacaaactacataagccatgatcataaacccaaactcctcgtgtaccgactcatcaatgtaaatgttcaaagccttatcctttcaatgatatatgattttttatgttagattataggtagagttcattgaattacaacgctatttttgaattagtaatcctctaaatatattaagttatcattttgcgtgtgacataactttaaacatgctgaacattaattaatcaatatgtccgcttctggcacaaagcggaccacctgaagtgttgcgaggcctgctatgagcgaggagcagacgttgttaacgtccttttttgttgaggagattatggtcgagccataaactactcctcaatgattcatcaaatatttggcaatttagaacgccttataaaattattgtaggtcaatatatattcttataattcttcctttatattgttctcccattaccctatatgcaccatcaccaaaaacagtttttatacatagggcagcacctaaattcccattatcaaatgggagaatgtcaaaacctgcatttgtaagagtggcatatgctgcacctgcataagaatacgatagttgacgattttcttttattaaagatagacgcccgtcttttattagctgatttatatctttgttgtatggtgacagaatttcatcaaatctattaaaatcatgcccgaatttaaatatatctccagattgggtgtcgatatatgaaccttctctaacgtattcaatatttttccattccgtatcaatatagcacggatctgtaatcattagagagccagagtcaacaaaaacctcacctaaatctatcaattcaacttctgattctgggattataacttcatcatcaatatctaagtcatagtaggttagtgctctgctaaaatattttgctttttcaagctctgaatttagtttgtctaattgtctgtttttctcttcaatttcgctcttgttctttatcgtatcttcatttaaccttaataattcttgctctcttagttttattctattagccaatactccctcaaaaaactcaggagactttttctctaattcggtagctttatctttccaaaaaaccaagttcttttctgaaactttgatttgttcatcttttaactttatttctgcttttatattttttacataagcaagataaagccaccccaaaacagttaaaactattccatttgttcctagttgcaaataatcaattaggaccttcatgccccccccctctaatttctatgctttaaaattgatttctggcatgtaataatactcattattacatgatatcataaccgtctttatggtccaatgaaaaaaatgatataacattaacgaagtatctgggttttgagtcaacatgattatttgcacagccttgatttaatttcacgtaaacgaatgaccttcgttaatatacagcctaactaaggataatatgacttctatagcctatagttagcttatatgtgcaacagttatgattccacgttattttgctgctaacccgttgattatgtcagctcctggcacaaagctgcctgccatgcctgcttaaaaaacaggcttggcgtaggatattttccgttttcccagcggaccccaagaacgccgacggcgaagatctgcgtaagcctgattcggtgaggtgcacaaagggggcgcaattcgtcccaacactctctacccttgagcgtttacagcaaggttaaggctgcaagacacccataagaaacccgccactaccggcgggttttttgttggagttatacagacgcctggagtagaaaaaagtatattcgtacgatctcttgacggtttcgactgaataataattacaggtaacatcatgggcgaacacgcagacactccaaacaatctcaatgaaatagccaggtttgcgctggctatgtacgatcacggctattttttctcagtccgccgtgatctcagcattaattttgtccgggacatgaacggtggcggaatgcagggcctattcatcaaaaaacggagtgatgagaaggactcaattcaagtcgtatttgactacacctacagcaatgatgatgatttcctctatgaagcggacctctggacggatcaacaaaaagactacgagcctactcttaacaggggcaagcaccgattcaaagcctatcggttcgagctagagataagctgggatagtgatgaaattcaccagtggcaatctgatattgaacgacttactagaacgcacgagactcttgacgactggttaaagagcgattcggagatgctggtacgttgcgcctccacatatttctgtcggaaacccgtgattctcacgttaaacgaccttaaacagtatgttgcaatgggggtaactctagaggacctaaaggctagacttaagtgctcgaagtgcggcaagcgtggagcaaggatcgcagtgttttgatccattgagcgctgacagcaaggctaaggccgcatgccacctataagaaacccgccactactggcgatttttttgttatggccatacaggagaagcccatatctattatcgagttataaacccttgcaccaggccctgcggaatctgggcatagcagggtgagccgacaatcatcgcagggccggggccgaaccgtcccataggtgtttggcaaaacgagccaacaactactggctgtaacggcgggttgttgatcggaacatattgcggtggtggcatgttgacaactggaggcggcatagaaacaaccggctgcggattctgagggaatcctcttgattgcgcccaggctgcataacgatattgtttgtcataagcgggttgttctactgtgccatggtcacgtatgtatgaaatggcaaagtcatgagcaccccatctcgaatactgatcaacatgagtaagttcgtgtgcccaaatcgctggattattagcactggcagtatcacgaaacactatgacgtctatgagggtcacagcactagcttgcccggcttgctcaataacacgcgacagattgaggaaaccattatcctcgaccttaaatctcgccttattcatagagtcttcacttgcatacccggtgagcatttgacgaatcataggagggattggagccgtcccatttatagccgtgtttcgagactgaataatccattgttccaaggcaggggcaccagcttgtgagacaagttcattgaggcttgggccgactatcggcaatcccccgataaccccacctccgcatgtatcgcataaatgtccaataggccctagatttatatccataccgttactgttcgaagcagagatcattaaggcagtagttaaaaggcaaagccggatgttctggtacatagcttcatctccacagaaagctacatagttaaaaaaggtattgtaagaatagttgcttgggcaatatgtttctgaatgaaattatattattttaatatattaggctccgcagctaagagcggtatgaaaggtgccttttgccggacttgatcctccgacctctagtgcgaggttgttagatatcaggctgttttgaacgaggcgctgacttatactcgtatggctattgcgaaacttgattaaggtaaggagagcgctcttgtcatcttgggctgatataagaattgacgggtatgtgattgaagaatttactcattatggctgtcatttttggtacttcaaacactcggagcgagtaagggaagtggtcgagagaacttctgacgaggactcagatgatgtacgtgattttataggatatagagcaagcgctaaaacgatacaaaagcggctggaactgaacggtttcaactacctgactctgaaggaagactttaacgtcagtctcgaacgctatatcgatcagcttgagtatggactcagaacagtacaggaaagactttctaaaaacattgatgacgccttttatcttaatatgagggatatacaaagcaatattattcaagtaattaaaggaacgtcacttgacgaatggcttcaattgctaccggcggcgcgtaaggaaaaaataagacggaagcacgataaaccgtattcagatggtactccagaatggagcagctgtgatagctccccagcattacttaatgcaatgctgagtactccgttaatatattctgatagctatttggcggctgactttaattttccggtatcaaatcctgatttcttctctctggcgctgcttttaaccgtgccagatgatgcaatttgtgagcttgacctgaccgagcttattgtcgctgaatatcttgatgattttactgatcttgctgaaatagctttgtccgaaacctctccttgcaaagcctgccgcgaatcgcttgctgagctgtcggaacttgctggggtagaaccatctaactccacgcttcaaaggatgtgttatgccagcatgattacggcaatggaaacctatcttggtgacattattaaacgagaaatcatgacgcgccctgccttaatggagcgttttgtaactacctatgaaggatatagtgagatgaagtttccactcagcaatattcactctcagcttcgtaagctagataaacgagtccgtgacaccttagatggaattgcttttcacaatcttgctaaggctaaagaaatattccgtaatgtattgatagtggagtttgacaatagcagctttagcaagctttgtaaggccgtcggtacacgaaatgatattgttcatcgaaatgggaaggacaaaaaaggaaacattgtcagtcttagtattggcgatattcaggcgcttagaggagtgattttgcagtttatcagcaatattgatcagcaagtgcttgatggcctagcggcagcgtgcgcagaagattagttgttgaccgtccgctctgggtgagaagaggaaatcacagtcgttgtcacaacagttgagggtcaacttaagttgtggtctgttactcaacggtgagcaggtcaagtctgtttttcagtgtgacgactcaactagatatcatcacgcacagtcactatctcgtctcatttttctcatcaaagggagaaaaaacttttaggcacccaaataggcaccagcaaaaagttgaactagtagttaccaaagtaaattcaatagattaaaaaaccaattcagactccgccagcccaccaaaattctccatcggtgattaccagagtcatccgatgaagtcctgagagcccgcacggcgcaagccctgcgggcttttttgtgtctgtatcggtctggcgggaatgactgaggaccgcagccttgtggtgcctttttgggctccaggagaaagagccaaaaaacgcgggtcctaaaatggtaaaactcattaagaggctcattgcggctgaaagcacaagcatgaagccttcagagcagacagcccgaatatctgtaatgggtcaggcaacggttgcctgcacaatatgagaaaccgctgcgactattcaggcaaggcaatcaacggcatggaaaaagagctcttccgtcatgatggcattctctttttcgctctgatgttcacggcggataaaccagcccgtttccggcgccatgctcaggtaaaacagctgagtgattccgggggcattaacccgcattgtcatgcagcccgtttccacacctcgacagagctgttcaggtactatgctgacgtgacgatcgccgttctggagccggattgtggtgatgtcataacggcatataccgctgttcaggctatagccgatcgtgctcagatcatggatatgctttgttgatagaatgatctcaatgccggaacccgcaaaccactggctgatttgctgcaccagcgcatccatccggcggcggaatgcctgaatttccgcctcagcggatttattgccgggcggtatgctatcggagttctgctgcactttcttaaaaaaacgttctctggccgacacgttatcgcccccgttaacttttaatacgttgtgagatatgcgctgagcggcattctctttttttcatcgccgctcccgccaccttatttttcgtaaacagattaagcgcacagcactgcggcacgggcgggatcgatggcaatcagctcggcaagcaggcggtccatagcagactgcaggcggtttttgtcggtttcactgcgcccggccttcatgcgtagcagcctgaggtggcgggctttgacttcgaacagcagacctgtctcccattgtgccagcggaattccggcagcatccgcgcccagttccgccagcaggtgttgcgccagctcatttttgccggtctgctcggcaatacgcgccatcagcaggcgcagcagccagcggctgcgcacgctggtgatacccgggcggttctgcagccaggccagcgccgcctccgggccgtcgctgtcggcaaccgcgagggcctccggctccagcagcagaatatcgtcatcgccggatgcggtagcggcgctggcggcagtatcatcccgccagcctgcggcgttctccagcacctgctgttgtatccagttcagcgtgacctcatcggcaaacggcgtgccgtcgttaaatgccagtccttccagccccgtcagccgggtcagcagccctttcaggtcattctgaataatagcggcttccgcttcccgcccagccttcagcagagcctggtggatataccactgcaggtccagccacagatgattcgccccacgagaaaacatcccgtcagcctgttccagcagttccgtccagctctgctggagatacaaccgcttcagcaatgcccgctggtccggcttcggcggttcaatacgggttctgccttctgctgatagcggcggcagctgatttagcgtgtcgtggcgaatgcttttcatcagatggtgagcggccagccagccctccggctggtcaccgagatatttcgccaggatacgcgcctgcgtcagcagttcctggccggaggtgatagggctcagcgccggcgtatagttgtttgcctgagagggcgaaacatcgctgacgttctgcggcacgacggcatccgggccgcccgacttcaacagacgggtctcgaggacgccgcacagcgcatcggggacagtcccctcctgcgcctgctccatcagcaataatgcgccgctgatacgcaaggcatcagtactgccggcctcggggtacagcgacaggctgtcaagcatccgctgtccggcgagccagtcaaatgcggcccttcggctgcgctcccgcagcgggtgcagctgctcgccaaaaccctgcatcagcccggccagcagttccagtccgtccgccagaccgctttcgccatcccggtgcagccgcgcccacgcgtaatatgaggcaacgcgaatatctttggtcacggtggtgagcagtttttcggccaacctacaaatcagatcgctatccgcaccggtgatcttgttcacctcttcgcgcatcagctggaaatcatcatcgtagccgggatcgtcccccgcgggtttatcggctgacagcggctgcagccagttgttccacaacagcagacgttgttgcgtttgtaccgccagcgcatcagcagcggcctgacagactgaaatcagagtataaacattggccatcagtacatctcctctccggtcagcgcggggcaggctgccagcgccgttcgggccacggaatcagccacctgcgcgtccagcatattcccggttaatccattaaataacgcacgccgtttatttcggggccagcgcgctcatttcgtcgcgtaattcctgcgttagcgccgggtctttcaggattttttcgaactcttttctgaaaatgcgtgccctgggcacctcattctggaacgtatcagccatagcggtcccttcccgtgaggaataatgtgttaaagataacggcgtgtgatgaccaggatatagtagagcaaagcgccaaaaaatatcaacctgccggccccaaagtccattataagactttcctcagacatcttaaggcaaatgtaaaaatgaaacgcatcagacaaacaaagccggtatgtaataacaaccttttgcttacaataaaggctaagtgtatacctggcagaggaatatgaattaaattcatatctgaatagacggagttgattgatgcaaatcaatgtgcagcggaaataaagatcattcctgacactgaaaaaatcgcgaatagcgaagtgtgaaataaattattttttatggtttacaggctgtaagccgcccggctctgggcataaatatggttataattaatggctggcaagattaatataaaattcacaaataatatccggcagatatcaagtcgggattcattgggaaagcaacagaggtaggatcgcagttccgtcttcatactcgttgagaatggtaatatgctgcttttcacacctcgccccgtatgacgaagcggcgcattacgccggggaggcctcgggcgtcaccgtctttgagtcaaacctcatgcagctggattgactgctgccggaagcgatcggttgaaagcgcgatgggcaatattctgcccgccaggcgatagttgcagccatgatgtccgtcccggacatctgactgcccccccctggtatgcgggcgatggctttgcggacacgcaagtcggcggggagccgctatcgatcgctcagggaatgagttcgaaggtaatggagattaaggtatccggattcaggtccgctggcgtgctgctatacagcgagccggcctgtccatatagcgtgaccgttccgccttttaatccggatgataatactttggccattagcggatcgatttgcttatcgtaaaccatctttgaattcatcgtattgagtatcggcgtaccatcaagcttcttctctaggatattcatagacaaagtctcattcgacttgtacgactcctttccttttttatcaaccacaaaatagacaccattaggcaaaatctcatatttcttgtttttgattttagccatgattcttttttcaatatcgacgtacttagacgatagttgttcgttaagcatgttaacgatactttctatttcattttctttaattttaagttttttattataagcgtcgttaaacccggaaaccaacgctgaaggcgccagcttgacattattgtcggccattttattcacatcggatagcgcttgggtaaggtagaaaacgccgagcgcataggcatttttatgacttttatccgcaaggcttaaatcactttgcttgatggccaggctatcgatcgtagactgtaatttttatttttatcgtttaaagcagcgactgaaacatcatattctttctgcgcggttgcggcggcggcgttcagctcggcgttctttttggtcagcgcatcaagcgcggttttctgctgctcttccctctccgcgtgctgcttgttcagcatggcgatctgcgccgacagcgcacgggtggtctcatcctgctttttctgcgccgcttcggcggcggcggccagctcggcgttctttttgtctcagcgcatcaagcgcggttttctgctgaccttctctctccgcgcgctgcttgttcagcatggcgatctgcgccgacagcgcgcgggtggtctcatcctgctttttctgtgcagattcggcagcggcgcgcagttccagattctttcccgtcagcgtattgatcgtcgatttctgcaggttctcactctgctccttctgcgttttcagcgcggcaatctgcacagatagcgtgcgggaggtctcatccagttttttctgcgccgcttcgacagcggcggccagctcggcgttctttttgctcagcgcatcaagcgcggtggtctgcccgctttcgttctgtgcacgctgtgccgtcaatgcggcaatctgcgccgtcagcgagcgggtggtctcatccagttttttctgcgccgcttcggcagcggcggccagctcggcgttctttttgctcagcgcgctcacggcggcagtttcgccgctctctttccgtacacgctgttcactctgagccttcagctcggcgatctgcgccgacagttcgcgcgtcgtttcagcgcgctttttctccgccgctttggcggcagcgctcagctccgcattctgtttccgcagagcgttaatcgtactctctgttttattctgatgacttttttttctgacgacgtcctgcttctgaggcgtttttttatcagggctatcgttattttgcttagacgagaccgactccccgctggcggcgcctgaggccggcggattgtttatttcgagtttcgatatattatcaaggaagtctcccggctcagcacgagcaggaaacacaacaataagggtaaaaagagcaaatacaatcgcaggacctcgtagattgcatatattcagtttccccttagcgtccatcatctggccagcccatccttgagttcagcttttcttgcccggctttcaaactctttaattaatttctgcgaaatgctattacacttatcgtttatcttgtattcaaaaagcggtgtaatcgttgattttacgctggcggaggtttggtctgaaacagaagcataaaacttagcgtcattgattaaaccatacagctcgtttgaatcctgctgaaactttttatcgagcttaactaaagcgtcggcatcctggatacactgctgtaaagcaggaacctgcgcgggctgttcattttgaatgacatctttttttatgagtgcgctctgcggttttttaccattagtacacccctgtaataaacctacagaaatgcacaccaatgccaataagctatttcttatcatcttcccatccattagaaaaaaatacgtcaaaaatatatttatcgattgcagcagaaaaatttttaacaaacaacgtcaggcgttggatttaacattaattcagaaaaaacacacaaaaaggtcattttttaaccagatcaggaatgggaattatccaggtgcaggacgatatttttatctaagctttttctcaccaccatatgattaatggcacattaccttatatatgcctgatattgagcggtctttttacaattctaatcaggcataagctgttactcattcaatgcgaatctcattcgctccacttcggtctggccaccgtattcttcttgagtagattgcgaaactccttcagatagggttcgttgctgcgcccgcgcttgcatatcgccgagaagggagattgaaagccaaactcattgggcagcagtacgcgcaggcgattctccttaatccacggccaggcgtagtgctcgggaaggtagccgatatatttcccggagaggatgagcagcagctgcgcatcgacggtttcaacggtcgcgctgcccttgctgaacccgcgccgccgcagatcgctggtattccagtagctgcgcgtcaccagcggacactggctgatcagctctttatcgagctgtcgactgaagaacatgggatgcaggtcgctgcagtagagccagtgctgctcgcgatagagcggttcgctgatgatgttatgcacccgcgagttgtagctgccgatggcgagatcgatatggttattcaatacgccgttaagctgttccgccggggtacggataatcagcttgatatgcacattaggaaacttatcgctaaagctgcgcagcacgaccggcagcgacagcgcggtctccgtctcgatggaatcgagcgttgagatacaaatcgtgccgctatgctcgcctttcagcagcgccgactggcgctccagttcattcagttcgctcagcacgcggatcgcctgctgtaaaaaatgctgccctttttcggtcaacgcaaagccgccgcgcccgcgctgacacaggctaaagccaagctggccttccagctgcgacatcgcattgctgatcgcggaaacggaaatccccagctcctgctgggcccggccatagctctcaagacgggccaccgcctcaaaaacctggagctgtcgaatgttaagcgtcgcgtcgttaagcatagcgtcttagttcactaataaatgaactaagtatttgcggcagacgatttaaagtccagcacatctttcgcactatccctgctgttgagttttgtttgtcagattcaggagctgaaatggataacgtctttcatcaaccgcagggtggcaacgagatgccgcgttttggtggccgcgccacgatgatgcgcctgccatttatcgaagatttacagggacttgatgcagcgtttgtcggcatcccgctggatatcggaacctcacagcgttccggaacgcgctacggaccgcgctatattcgtaccgaatcggtaatgattcgcccgtataacatggccaccggcgccgcgccttttgattccttgtcggtggcagatatcggtgatgtaccgatcaatacctacaacctgctcaaatcggtgcagattatcgaggattactacaccggtttaaatagttttccgcttatccctctgacgctgggaggcgatcacaccattaccctgccgatcctgcgcgcgctgaccaaaaagcacggtccggttgggctgattcacgtcgatgcccacacagataccaacgatgaaatgttcggcgaaaagattgcccacggcaccaccttccgccgcgccgtcgaagaggggctgctggatcttaaacgcgtcgtgcagattggccagcgcgcgcagggctacgccgccggtgacttccagtggggcgtcgatcgcggttttcgtctggttcaggccgagcagtgctggcacaaatctttgactccgctaatggccgaagtgcgccagcaaatgggggctggcccggtttatctcagcttcgatattgatagcctcgacccgatctgggcccccggcaccggaactccggaagtgggcggactgacgtcgattcaggcgctggaaatcgtgcgcggctgccgcggtctgaacctgattggctgcgacctggtcgaggtctcgcccccctatgacgtcagcggcaacacgtcccagctggccgccaacctgctgtatgaaatgctctgcgttctcccgggcgtgaaatatccatagaggaaaaaccatgcagcttaacgtctttcgcacgctgtggggcgtcaccaccccgtggcagcaaacggtcagcgaactccggagcgtcggctgctgcggcattgaagcgcgggttccgctgacgccagaagagcagcggacgctggcccaacgcatcgaagcgtccgcgcttgagtatatcgccattgtgttcagcggcggcggcgttattccggcccaggccgagacgcccgcgcagcatctggagcgcttaaaagaacgttttgcggcggcaaaagcgcttaatccgcgcttcgtcaatctgctggccggtaacgaccgctggccgctggcgcagcaggtggattttctcggcaaagcgcatgagctcgccgccgaatatgagctgttctgcagctttgaaacccatcgcgccacatcgctgtatagcccgtggctgacgctggagataattcaacagctgccgcagctgcgctttaccgccgatatcagccactggatcgtggtaagcgaacgcctgctggatgacccctgcgatgacttcagcgcctttatcgaacgggtccaccatattcaggcccgcgccgggtacgaccaggggccgcaggtgccgcaccccgccgcgccggaatatcgggcggccctgcggtttcagcagcgcttctgggaacagatctggcaatcgcagcgccggcgcggctaccagcacaccacgcttacgccggaatttggccccgatggctacctgcatcacctgccgtttaccaacgttccggtcgccgacctgtggtcgctgaacgcctggatggcccagcgtgaacagcagcattttgttgaattcacctcgcaaactgaataaggaacggaagaaatgaccgctgcaaaaagttcgtttactgaattaccgaccatcgatatcagcgacctggcctgcgacgatctcgtccgacgccaggcggtggccgacgccatcggccaggcggcccgcgaagttggctttttctacgttaccggccacggcatcgcgcctgaactgattgccgggatccgcgcggcggccaaagagattttcgccctgccgatggagcgcaagatggcgtactacatcggacagtcgaaaagccataagggctacgttcccgaaggggaagagatttacggctccggcaagccggatcacaaagaggcgtttgatatcggctttcaggccgccgacgaccacccgttcgtcgtggcgaaaacgccgctgattggcgccaacgagtggccggacgtgccggaatttcaatcccgcgtgctggcctactatgacgcggtcttcgcccttgggcatcgcctgtttgacgccttcgcactcgcccttggcctgccggagggctatttcaggtcgatggttacctgcccgccgtcaaagctgcggctgatccactacccctttgacgccagcgccgaagatgttcccggtattggtgcacacaccgactatgaatgcttcacccttctgctcgccgaccagccgggtcttgaagtgctgaatgaagatagcgactggatcgacgccccgccgctgaagaacgcggccggagaagaggctttcgtgattaatatcggcgacatgctggaagtcctgagcgctggcacatttgttgcaaccgcacaccgcgtacgcaaggtgccgcaggaacgctactccttcccgctgtttttcgcctgcgactaccacacgctgattcgcccgctgccgggcttccttgaggcaggcgaagccagcgaatatcaagaactgagcattggtgagcatatgtggagccaggcgttacagacctatcgctacctgcgcgagaaagtcacccgaggcgagctccagctccccgaacgcgcccgcggcactaacacctttggccatctgaaaaaacaagcacagcaaaaaaccgtaaataacccgtgaggataaatgatgaacaaaacgctaaaaaaactctcgcgccgtgtggctttatccatcgccgtcaccgcttgtttttcaccgctggctcaggccgctgagttgctgaccgagggcgtctttaaagtcgggatggaggtgacctatccgccttttgaatcctatgacagcaataacaatattgtcggcatcgacccggagttcgcggcgctgatcgccgaacagctgaaggcaaaaccgcagcttatcgacacgaaattcaccagcctgatcttaggtatcggtaaaaaatacgatgcggtgatctccgggatgtacgtgacgcccgagcgccagaagcaggcggacgctatcccttacgccctgtccggcgcgtccattattgcgctgaaaagcagcgccattcagccaaaaacggaagacgaactgtgcggcgtgaaggtaggtctgcaggcgggtaccgcctgggtttccagcctgaaaacgcactccgacgagtactgcctgaaaaacggcaaaccggccattagtattcaggaattcccgaccgcgccagaagcctcccaggccctgctgtcgaaaaatatcaacgcccagttagaaatcgccccggcggcgcaaattatcgtcgagaaaagccgcggccgcctggccattagctcgaaccgtctggtctatccgctaccgctgggaatttacgtcgccaaaggcaacaccgagctggccgaggccattaaatcaacgttagccacccttaaagccaacggcaaatatgacgccatcatcaagaaatacaacttagaaagcatcaattaatacaataattaaacgggagtcggtatggagttcgattggggatactttttttcattatttagcgttggggcattctggcaggcgtgtgtcaccgtggttgtcgtcagttcattgtcctggtttattggcctgatattaggttttcttttagcctgcgcgaagctctctggcccgcgctggctgaaggttcccgtcgaactctatatttggtttttccgcagcgtaccgctgatggtcctgctggtctttgtctataacctgccgcagctgtttccggccacccaaccgctgctcggcgttccgtttattgcggggctggtctcgatgacggtgaccgaagcggcctacatggcggaaatccatcgcggcggcctgctttcggtcgccagggggcaaagcgaagccgggcatgccttaagctttagctttatcgggattcagcgcttaattattatcccgcaggcgtttcgtatttccctgcccacgctgattaacgaatacatcaccatcatcaagctcagctcgattctgtcggttatttcgctgccggagctgctgctgaccggccagcgcctgtacgcgcagaattttctcgtcatggagacgctgctggcggtcgccatttactacgttatggtcgtcacggtgtttagctggctgttccgggcgctggaaaacctgctggatattcagcgtaagcgcccgcaaacgctcaacgagcatgaatgcgaaaccctgcgccagaacctgaagccgccggtacagacgcaaaaagcgcaggccgccagcggcaacccgccggcgctggatctgcacgccatcgaaaaatcctggggccagcaccacgtgctgaaaggcatcgacctgaaagtggaaaacggcgaggtaatcagcatcatcggcccgtccggctccggcaagaccaccctgatccgcaccattaacgcccttgaaagcatcgacggcggcgagatcattctttacggcgaggattacctgaagggcgcctccgttgttgataaacagcaaatacgcgcgggcgtacgccgcatcggcatggtgttccagggcttcaacctgtttccccatcgcacggtgctggataacgtgatgctcgccccgctctatcacaagctgctcgaccgcgccgccgccagagagcaggcgctgtggctgctggatcgcgtcggtctgctggcgcacgccgaaaagtacccgtaccagctctccggcggccagcagcagcgcgtggccatcgcccgcgccctggcgctgaaaccggacatcatgctgtttgatgaacccacgtcggcgctggaccctgaactggttggcgaagtgctgaaggtcattcagtccctcgcccgcgaaggcatgacgatgattatcgtgacccacgagatggacttcgccttatcaatttctgaccgggtggtgatgatggaaaacggcgtcgtgcagagcgatatgccgccgcagcgcattcgcagcgatgccgccgatccgaccctcacccgcattcgtgaatttatgggagtgcaataaatggtaactgaacgggaactacgccagcagctggccgccgcctatcgtctggcggcgctcttcggctgggaagacacgctgtatacccacttctccgtgcgcctgcccggtgacggcgagccgcggtttttgattaacccctttggcatgatgtttgacgaagtcaccgccagcaacttaattgtggtcgatatgcaggggaaggtcgtcgagggcagcgccccggcaaactcggcgggatttaccattcatagcgcggtccatatggcccgggaagacgcccactgcgtgatccacacccacacgctgccggggatggccgttgccgcctgcgcagacgggctgctgcagcttaaccaaatcagcaccgaattttatcaacgcgtcggctaccatccttatgaaggcgtcgcattcgatctcgatgaacgcgtgcggatccagcgctcgctcggcgagaacatcgctatgatcctgcaaagccacgggctgctgtcggtcgggcgcaccgtcgccgatgcgttttacatcatgtactacctgaaccgcgcctgcgagatccagatggccgccgcgcagctggcgccgctcggccccatccatacgatacctgaaccgctgagccggcacgcctgtgagcagctgatgggggttgaacatgaacgccagctggtgtggcaggcgtggctgcggcgcctggaccgtcttgatacttcttataagagctaatgcctatgactcagttcaccatcgtcgtggattgtaacgatcctcagtacacccgggagatttgcgccgcgttcgcgctattcccggaagtgaaagcggttctacccgaggagcccgccgcccgcgaggcgcaatacgcctgctgctggtttcccgacccgcagctgctggcgcgctcgcctcagctgaagctgatccaggccgcgtctgccggcgtagaccatttgcctgccagcgttttcgccagcgacgttccgctctgccgggtggtggatgaagattttcgtcacggtatgtttgaatacgcgctgtggggcgtactgtggtttcagcgtcgctttgaccgggcgctggcccaccagcgcgagcgcgtctggaagatgtatccgcagcgagcggcggccgattatcacgttggcgtcatgggcctcggcgaaattggcggctatatcgcctcgcagctggccgcgctggggtatcgggtttccggctgggcgcgtagcgaaaaatcccttgccggcgtgcgctgctaccacggagagacgcaggctggcgaattccttggccagctggatgcgctgatcaacgtcctgccgttaaccggggagacgcgaggtatcctcgcccatcctttactgcagcagctgcccgacggcgcgtcgctgattaactgcggccgcggcgagcatatggtgaatcaggacgtgctcgaggcgctggatagcggcaagctgtccggcgcggtgctggacgtcttccccgtcgagcccctgccccaggaggacccgctgtggcaacacccgcaggtggcgatcacgccgcatatggcctccatcgcgcagacggaggtgattgcccgccagctgctggacaacatccggcggcagcagcaggcgctgccgctgaaaaacctggtgaacaaacggagtggttattaaccttgcgcgtcaacggcgggatgtccgtgggttaaccgttgctccgtctggttgatatgatgctcaatgaccgcccggtgcgtatcgtccggcggtaatcgttttagcagcaaccgccacgccgtcagcgcctcgctgaaatgcgcctgctctgatgcactgagcgcatacagattaagcaggcggtcgttaacgcgctggccctccatcagttggcgcaccagcgcaccgccccgcgggtcagatacccgcagcagcgcctccgcatagccaaatgccgcactatcgttatccggagccagcgcgtaagcgcgagcataggcttgagtcgccatagcggcgttgtccaggaccctgccgagacgcccgagcataagccaatcctcaatagaagcgtccggattttgccacagcgtcgtgcgtagcccaagggccagacgccgcagctcgtcttcatcaagcggctgcgcctttggatcctgcacccgcgccaacagagccggcgtctgagccaccgcctgctgccagcgttgcacctgctgatagtggccggtctggctatagctgaccgcacctaccgccagcgcaagcgccgcgccaggtataaaaatccacggcccggcggatttatcctccggcgcccggccgtcagaaaacgtctcctgccctggcctgacgcggcggcgggagcgggccactatagcccaaccgcccatggcgatcgctgcggccggcacgacccacagcagcatcgtcagcggggttaatggcggatcgtaggtaacgaagttgccgtagcgcgccaccatgtagtccacaatatcgctgtcgctttttccttcctgcataagcgtaaaaactttctgccgcaggtcggccgcgatcgcggaactggaatccgcaatgctattgttctggcatttcgggcaccgaagctgctccgtgagcaggcgaaaccgctgttcctgctcctcgtccttaaacggcatgacatcaatagcggccagcgcgtttgcgcaaagcagcagcatcagcgcgctcagtaataatctcatggcgcagcctcccggctaaacttctcccacagcggcctgaattcgcgctcccacacccgatcgttaagatcccccgcgtggcggtagcgaatgatcccctgtccatcgatcaaaaacgtctccggcgcgccgtagactccgagatccagcccgagcatcccgtcgccgtcaaacaggctcagcgcgtagggattgcccagcgtgttcagccagccaattgctttctgccgatcgtctttgtagttcagacccaccacgcggatcccccgcgcggaaagctgattcaaatactgatgctctgcgcgacaggtcgggcaccaggtcgcccagacgttaagcagcagcggtttgccctgcgccagcgcatccgactgaaaatactgcccgggatcttccagcgcctcaagacggaaaatcggtaccggttttccgatcagcgccgattccaggctattgggatcgtccccttccacattacgcgccagctgccacagcagcagcatcgcgatagccataaaaatgaccagcggcatcaacaacgtacagcgcttcatctggcctccgcgccaggatatccgcggcgcgggcgatagcgcggatcgcacaggcacaacagcccgcccagcgccatcagcactcccccggcccaaatccagcgtacgaacggtttataataaaggcgtacggcccaggcgccgttgcccagctcttcgcccagcgcggcatagagatcgcgggtaaatccgccgtcaaccgccgcttcggtcatcatggcgctgctgctgtggtaaaagcgcttttccgcattcagtatcgcctgcggttcgccgcgtcgcatgacgccaatcaccgcgacggcggagcgatagtttgggccgatcgcctctttgacctcacggaaagaaaagcgatattcatggacatcgacgctgtcgcccacccgcatgcgcacgtcgcgctccacgctgtaattttgactaaaggcgatacccacgagggtgaccgccagcccgaggtggcctgcgaccattccccagtagctgagggtcatcctggcgccgcgtgaaacccgcaaagcgatctctactcccgccagcacaaagacccaacaggccatcgccagcccgaccaccgtcatggcgacaatcttatcgcccaaccaccacggcaacagaagcgacagcgccagcgtgcttgcgcaggcgataaccagcagcctcctgagcttacgcgggcgatcgcgcccccagcgcaccagcgggccgatgcccatcaggagcgcaaacggcgccatcagccagctaaacatcgtattaaagaacggcgcgccaatcgaaatactgccgagacccagctgtttatgcaccagcggcagcagcgtacccagcagcaccgtgagcatagcggccatcagcagaacgttgttgccgagcagcagcgactcgcgcgaccagagcgcattatttacccgagagcggactttatagccacgcatggcgaacagcagtaaagagccgccaatgaccagcaccataaaggccagaataaacatgccgcgcgccgggtcggaggtaaaagcgtgaaccgagaccagcacgccggaacgcaccagaaaggtccccagcagacagagcgaaaatgcgcagatagcgagcagaagcgtccacgccttgaagctggcgcgctgttcagtgaccgccagcgaatgcagcagcgcggtgccggccagccatggcatcagcgacgcgttttccaccggatcccagaaccaccagcctccccatcccagctcgtagtaagcccacgcggagcccagcacaataccgagcgtcaggaaggcccacgccgccagcgtccacgggcgagagaagcgagcgaaggtgctatccagccgcccgctcaacagcgcggctatcgccagggcaaaactcaccgagaagcccacatagcccatatacagcagcggcggatggaaaatgagcccggggtcctgcaacagcgggttcaggtcgcgcccttcaatggcaaattccggcagcgtacgggcaaacgggttggaggtgaacagaataaacagcagaaagccaacgctgatcgttcccatcaccgccagcacccgggcgacaatatcaagcggcattcgcctgctgcgcagcgctaccgccactgtccagccgctcatcagcagcacccatagcagcagcgaaccttcatgtgcgccccaggctgcggccacgcggtaccggatcggcagctgagtattggcgttactggccacgtagctcaacgtaaaatcgttggtaatgaaggcgttaatcagcaccataaaggcgcccataatgaggatgaacagcagaacggcaaatacccgggaagaggccatcattcgcctgtccccccgcgccgcgccccacagcggatagacggaaagcagtagcgcgacgccaagcgccaggcacagcagcccgttgccgacttcaggcatcataaggatgtgtccctgtaggcgctatccgggcgacgatggttgctctccatcgctttttccacgtctggcggagtgtagttctcatcgtgtttggcgagcacttctttcgcctgtatccggttgtgcgcatcaagctcgccctgaaccaccacgccctgcccttcgcggaacaggtccggcagaatgccttcgtagctgacgtccaccgaaccttcggcgtcatagatgctaaaactcacctgcagcgaattcgcatcccgcttcacgctgccgggcgtaaccatcccgccgacgcgcagacgctgaccccgctcgggccgctgctgcgtttcgcgcttgccgtagaggatttcgccaggcgtatagaacaggtcgatactggaacgcagcgcatagagcaccagcgcggtggtcagcgttagcccggcgagcaccgcgagggcgacacacaggcggtttttgcggcgaatattcatgtcgcctcccgcgccgcgcgcctgcgggcttcacgggcgcgctgccgggcgatatcgcgcagaatgacacgatgcaggatcgcgctgtgcgcgaccagcgccgccagcggaagaacggtcagcgccaccgccagccagacataaaaggcatagccgcccatggccaggaaatcactccagcttgtaaatgcgctgctcatcgacgacctctttttaaaatcagttcactgacccacgggcgacgtttttccatgagcaaaatcagattccgcatgcgcattagcgccagcgtgataaacagcagcaggtagccgataatcgccagccgcagcggcgcgcgcatcgccggggcgatgctttgctgcatattcgttgagccctgatgcagggtgttccaccactccaccgagtagtgaacgatcggtaaattcaccacgccaatcagcaccagaatagccgccgcgcgcccggccagacggcgatcgtcaaaagcgtgccacagcgctatcgcgccgacgtagagaaacagcagcaccagctcagaggttaatctggcatcccaaacccaccaggttccccacattggcttaccccacgcggaaccggtcaccagcgccacaaaggtaaacaccgcccccacgggcgccatcgccgccagcgccagattggccattttcatctgccagaccacgccgatgaacgccgcggccgccatcagggcataaatgcccatagaccacattgccgccggaacatgcagatagataatgcgatagctctcgccctgctgatagtccgcgggcgcaaagccaaatccccaggcccagcccgcgatcagtaccaacgcgctggcgccgcccagccacggagcgaccctgccgcagagctgataaagccgcggcggattcgtcagttgaatccctgtttttctcatatttcagtcaccagaaataaagataaatccattgataagcccgggcctgaatccccggcgccgcaaacctgataagcgccatccatcaaaaaccgcgctagtgcagactgacgcgtagcgccgccgccgtcgcaaaggggcttaacgttgcgctgcccgccagcagcgcgcccagtatcgccatataccccgtcacgggcagatgcatggaggccgcatccatcgcggcggtagcaaaaataagtaagggaatagtcagcggcagaaccagaatgcttaacagcgtgccgccgcgcttaagtccgacggtgagccccacgcccggcgcgccgaggaaccccagcgtcggcgtccctaacagcagggtcagcgccataattttccagccatagacgtccatgcccagcagcagagccaccagcggcgacaggatcagcaggggcacaccggtgaccacccagtgagccatcactttagccacgaccaccgccggcagcggcaaaggcagcagcatcagctgttcgaggctgccgtcctgtaagtcgtcgcgaaacaagcgctcgagcgccagcagcgaagagagcagcgcagcgacccaaataatgccgggcgtcagccgcgccagcagctgcggctccggaccaacggcaagcggaaacagcgtaatgacaatcaaaaaaaaccacagcggattggcgatttccgcgcgatggcgaaacgcgacccgcagttcaaggcaaaaaatccgccacatcacggttccgccctctcgccgcgcagcgcaatgcgtcgaatcctgtcggatgccgcgctaattgattgatgggcagtgaaaatgacgatgccgccttgctccgtgtgctgcgccatgcgctgaatcaggcgttcgacgccctccgtatcgacggcggtaaaaggttcgtcgaggatccacaggcgggcgcgggtcagccagaggcgcgacagcgccacgcgctgctgctgaccggcggagagctggttaacaggaatatcgtcgaagccggcaagcccggcctgctcaagggcctcccggcactgggcgatatcatcgtgttgatggagaaagcgcaggttttccatggcggtcagcctggctttgattcccggcttatggccaatccacagcaggttttgctggtagctatcgcgaacgcgatgcagagggcggccttgccagtagatttctccggcatcagcgcgagccagcccggtaagcaggcgcaggagagtggttttccccgcaccgttgcctccggctatctgcacccaatcgcccgccgaaacgctgaatgaaaaatctttcatcagcgtccgaccatcgcgttcgcagtgcagtttaatggccctgagccagctccgggaactttcgctcatcatcccgttattgccccggctgatacggcgtataaacaccggtcaggctatgcagaaaagcgacaatatcatcgatatctttttgcgctaaatccgtaccgacctgatagcgcagcatcagttttactgcgccatcaagcgtcggaacatcaccgcgatgaaaatagggcgcggtgagcgccacgttgcgcagacccggcactttttggcgtaatttatcccgtacctctttcgtcacattcattcggccaatatcagcagccgtgatttcaccaaaattaaaatcacgcttcagccccagcggttcaaaagagcggccgccgagaataataccgccgtgacaggtagcacatttattatctttaaatagctgatagccatgtttttgttgcgcggtcagcgcgtcttcatcaccgcgcagccaattatcaaatggcgcgtcgggggtaattaatgttttttcaaattcagcgatagcgtcagtgatgcgctcaccgctaaaaccttgcggataaacggctaaaaaatcctttttcaatacgggatctttatccagtttattaataatgtctccccaggattttgatgccatctcaatggggtttaacggcgggccaccggcctgttcttgcagcgttgatgcccgtccgtcccagaattgctcaatattaaagacggagttaaataccgttggcgcgttaattggcccaacagcgccccccacgccgatagacgtttttctgccatcgaccccgcccgcgtttaacgcatgacagtgtgcgcaagaaatagtgctatccccggacattcgcgcgtcgtgataaagacgaaaacccagcgcagctttccgctcatcaacgggcagctttttagggatcggctggagaggttcattgcgatgctgcgcggcggtatcagcgctggcgtagtagcgctcgcgctggtgcttaatccagttgagtatctcaatacgttcgctgtcgctaacgccgccggcccagtgcagcgcgacgtatcgcgtaggcggcatcgtttgatgctgcataacccactcaatcttgtttaattcactttgtgaaacgggtttatcgtcaatcagtgacgtacgcacggattgaaggttaaaggatttgtatcccagctgtacgtcataatccatcagctgtttggcaacgggaaaagcggcgtaaaagggcaactccgccgagggggtatggcaatagtcgcaacctttttcactaaaaaaagagaggactttattattctcggcaaccgccgagagccggacgtcgttttttttaatacgctgactgtcgtaataccagatatagcctgacaaccctaaataacataacacgcctgcggtaatgaccgaggctgtaatggtcgcaattttcttcataagatcattcctttgaggcattgcagctgagataatgacgttttatatttatagtttcacgtaacatcatagcggtgacgacgccgtggatattgattagcgtcaaagccgatgacaggcaggacctatagatataataaccacaccctatcatcactatattattctgcgctgcgcgcggcagctaaaaacctcactcccttgctcaattttccatgtattcattcttattatataaacgggtaaaacattaatgagaggattcacattagcgtgtttccattaagcagtaaaaaagagagatgaattttatctcaccctaccaattcatattttaaatttgctctcgcggcagaaataaaaagcggaaaaataattccgcctgcgtttgaaaagctaagaggattaaccccttagcgttgggcgtcggcctgccaacaatgcgatcagcgcaaccgcaaccggcaccagcgatccccacagcacggcattccagccgaagaggttcatcaacgcgcccgaggaaaatgagccaatcatcatgacgccgaagacaataaaatcattcagcgattgcacctgagttttctcttccggccggtggaaatccataatctgcgccgacgcgccggtaaaaccgaagttccagccgatacccagcaggatcagcgacagccagtagtgcatcacgtcgataccggcgaggccaaccatcaccgacagtagcagcagaactaaaccggccgcgttaatacgccgggcgccgaagcgattaatcagcttgccggtaaaaaatccgggaccgtacatggcgatcacgtgccactgaatgcccagattcgacgcctgctgggagatcccatgcatgtgcatggaaagcggcgccgcggtcatcaggaagttcatcaccatataggatatcgcgccgctaaaaaccgtccgggaaaaacccggctggcgcacgatttcgcccagcgggcgcccgcccgatttggcctgcgccgccggctcgggggtttttactcccagcaagaccagcgcggataccgccgccaccagcccctgagcgataaaggtcatcgcaaaggtgtgcggcggccacaaattcatggtcgcggtcaccagcatcgggccgatgatccccgccgccacgccgccgcccataaccagcgagagcgcccgcgcgcgccgctcgccgctgacgccgtcggtagcggcaaagcggaaagacaccgccaccgccgcataggcgccgccgaaaaaggccgcgagacagaacagcccgaacgaaccgatcgcgaccgccagcgccgccagcgctcccgtcaacacgccggcgccggtaccgaccataaagaccgttttgcgcccgcgtcttctggccagcgcgccaaacggcaaaatacaggccgccatacccagcacaaaaatggtgatgggcagcgtggccagcgtcggcgagggcgcgatggcgttgcccacaatcgccccggtggcgtaaaacaccaccgagtttgcccctgcgagcgcctgcgccgtcgccaggcgaacaatattttggttttgctgtccgacgggcagcgttatctcagcgctcatgactctctttatcctgaattcgtttgcgttatgccaataccctgactgacataatgaacgtaatcaggcatgacgaccagccatcacgccgccatcaatatcccaaaccgcgccggtcacccagcgggtgctatcgctgagcagaaacgccacggtttgcgcgatatcatcaggcgtgccgacgcggccaatgggatggaagccgtcaaagctgttcatcacatccttcacatcctctttagggataaacccttcatatatcggcgtatgcaccaccgccggcgataccgcattgacccgaatcccgctgccgcccagctcaatcgccagatttttggtcagcgcatgcagacccgctttcgccatggagtaggctgacgacggcgttgcgccgatggcctgctgcgcccacatcgagccgatattcacaatcgaacctttgatgccattagccagcatattgcgcaccacctcgcgggtaataaaaaacgtcgcgcggttgagatgcatataccgatcgtagtcagccatttcatgttcgataaacggcttcgggaagaaaacgccggcggcgttgaccagcaggctgatatcctgatgttccgcgttaatagcggccataacctgctgcataccgttttcgctcatcaggtcagcgacgataacatccactttccccactgccgccagcgcctgacgcgcctgttcggccttctgccgacgattgcccaccagtaccacgctgccgccattctccactacccgtttggccgtcgccagccccataccgctggtcccgccaaccactaacagttttttccccataaacgccgtattcatcattcacctcttcacgcttgatttgtgtagcctaagcatgcctttcctgcagcgcgctgacgaatgagaagaaatagcccaacgacaaagaaaatctatcttgatgacctatactgagacgcaaattcactgagggatattcaccatgcgatcgcttaaccgactgaaatggcttcacgcgtttgaagccaccgcccgccacggcagctttaccggtgcggcgcgcgagctgggcgtgacgcccgccgccgtcgggcagctggtcagggcgctggaagagtgggtcggccatccgctgctgcaccgtacccgtagcggtaaagagcgtctcaccctggtgagcgaagcgcaggcggcgctgcaggatattactcaggggctggataagctggagagcggactgaataagcttcgcggccgccgggcgcgttccgtggtggtgattaccgcctcgcaggtgctgatgatgaactggctgatggagcgcttaaaccgcttctctgaagtccatgataatatcgacctgcgtctcaacgttacggaaaagctgatggatgtggcccacggcgaagcggatttggcggtacgctgcggtcgcggcgactggcccggggtcaataaaacctggctgatggatgaagaagcggtgctggtatgcagcccgctaatcgtcccggcagacaaaaccgcctgcggcgagtggctggcggcgcaaaagctgattcatgatgatacgccctatcccggcgccagttttccatcatgggcggaagtgctggaggccgctcaggcgccaacggcgcgcgatagcgggttgcatattaactcaacgtcggcggtcatcctggccgcgctcagcgggcgcggcgtcgctattgtccgccgggcgctggtacaacagctcctcgccaccggccagctcgttcagctacacccggcccgccgctggccgctcacctggtcctactatattgtgacgccccagcatgcggtcatgcgcccggaagtgaaggtgttttatgactggctgcttcacgatgtgctggcggaagacccgatgcgctgattatcttccgccacacccgcatagaaaacctttattgctttatggttttagctggtcatgaatgcgccacttctgtttcagcacgtttttgtcctggctggccagccactggttaaccttgtccagcagctgcgggttatctttattcatcatatagactttgaagctggcggtgcccgggaacggctgctcattggccacgcaaaacacgcccggctcattgctctggtaatagacgccctcaatcaggtcggtcaccatcatatccgccgttttctgccgcagcgcttcaagattatcgatattgtttttcacccgaataatctgcgcctgtttgatatgttcatcgacaaagctttggttggtgccgcccggattcaccaccaccttcacgtttggctggtcgattttttccaggctaccgagcgccggcgccgccgcgcagttagccagcgcaatcttgccgttcggcaccaccggctggcttaacgcgaaatccttcgcccgcgctgcggtttccgtcaccccgcccatggcgatatcaaacttatcggccttcaggtcggcggagagcgtgggccagctggtcgtcacaaagctcacctttagcccaagccgcttgccgagatctttcgccatatcaacatcgtagcccaccagctccccggctttattatgaaacgccagcggcgcgtaatcgcccgggacgccgactttaagttcgccgctttgttgaatgctgttcatgtcgcgcgcctgggcgccaaaggcgacggcagcgatgacgaaaacaagacctgacttcaacttcatcgttatatccttgttcaaatgtgaaccgtttatgattacaccgcgctgcgcagcggatgctgtttattgtttataaaatctttaatcatggataccgtcaataccggcggcgagaaaggcggcatcgttccttcggccacccgcccggcgagctgctcgcaaaagcgctcaacctgattaaccggatacccggcaatatcctgggcggagtaacgccaccatcgtagcgccatcagctgctcaataatcgcctcgctgaagcgcatgcggatgatcttcgcgggattaccgccgacgatggcgtacggtgcgacgtctttgaccaccagcgcgttggcggcaatgacggccccatcgccaatagtgatcccctgcgccagggtgacattctggccaatccacacatcgttgccgatggttatcggccggggggtttttgcaaaaggataaaactggttggtcctgccgctatcggcggccagcgtcgccatcacgccggaatgatgggcataaaacaccgggctggcgctggcccactccaggggatgtcggtcgccgagcacctgtaaccgatcggcaatcgacgtgtagcgccccacgttaatcagcgccggcagcagggttcgcgtatagctaaaggcgcccagcgaggccagccgttcgccgcagcgcccccagtaggtggtataggcctcggtggctaagttttccggtatctcaatcgacaggtcgtcacggtaaaaggcgtggctacaggccagcgtctgcccgccgacaaaaatccgctgcgcctgcaatagtggcttaagctccccaaaggcgattttcattatcgattttcccgcacaaaagtattcccggacagccgcttaatctctcgatcattgatagcgtaccgatccgctcgccgtgcgaaaaatcgttatgacttctcttttttgtgagcgacagcgcgaaagcgacggtcagttatactccagcgcaaacgtcaccatgctattggcggtaccggcggttaccgcgtcatccgtctgtacgtactgggcgttaaagttgatattttccgccgcccccgcgctgctggcggtaatccgcttgagtacaggtaagttactggcctcattgattttgacgccggttccggcggcgggcgctggggcaccgttactgccgtaggtgagcctgacgcccacaccgctcgcggaggcgtttgctttacttagcgccagagtatccgttcccccggatggcgaggtgacgccaaaaaagccgatgcggatatcggttggcgtggagcagaagaccggtatggagaagcgcttcgcgacgccgccggtggtgtttttgcccttaaactccgctttatttaccgtgccgaggctaacgtgaatattcgcggttgaaacctgacagctgccgctgccgccgatatcgacattcagcgccgccatatcgagcgtgaccggcgagctggcgacaaaaccgctgcggctgtcggcctgctgctgaatagtgagttcgccaatctgcggctgcgccggaacgtttgcgtggttgccgctgaccagggcgacattgccggtcttataaaacgtcacaaagactttcaccacaatctgctgctgattcagcaggttagccatctcattgctgtcgcaaaccgtcacggattccccattaccggccgcatggctgccatcaataaagcgaacggcgccgccgctgcactggaagcccagcgagtatcctatgccgtccagcgctgaggggaacacgtgctgaccgccgattgacagcggcgttgaggccgtttttagctgccgataaaccagacgctttgccgccgctttcggcacctgaagatcgcaggagaaatgaatcccgctgccgttatccgccatcatgccggtcatctgggtattcaacggcagcgtgggcaggtacttgatattctggacgttcacggtcatctggccgatatctcctctgcaggtttccgcccagccgctgtggctataaacccccgccatcagcaggaataaaaacgatactatgcgcaaaatcacctctgtgcagacctactggcagaggccagagacggttttaaccggactctgccgctgctgtacggtatcggtaagatggaaatgcagcgcgcatctccgtgagagattgtcggcgttccaggcggcatcgagcgtcccttcttgcggaataccgctcagatagacctgcccgccatccgccaccatgccgcccggcgccgcgccccgatcgtcttctgctttacgcaagcgaacgctggcgccaaacggcagcgggccgtggctatcgcgaagggtaaacagcacgcggctgccgatgtgggtctgatagtttgcctgcaccaccgccccgccgccggggatcaccgtctgcccttcaagttcaacatcggcatcgtcggccagcgattcggtatcgagcgtaatgatgtttttgcgatacgccgtcagcgagggcaccaccgcatagccccgccagtcggtatgcacgttgctgccgttctgaattgccacgtcggcggctcccggcgcgcgtacgatggcaaagctttcgccgacggtctgacccagcgtcacgccatgaggatgggcgacgatggaccccgatgcgccccaggtcagctgatggcttgcgctatcgcggcgatagccgagctgcgcggttccatagccgccgtggtaatcgagcgatgcgctgctgttgctgccctggccgccgttaacgtagccctgctgaagggagtagtagagattgggattgcgcggaagcgaaccgtacagcgacgcctgctgcgaggtgcgtccgttattgtcggaggtggtgctgtagctaaccgcgctctcggacagcgggccgccaagcggaatgctcaggttcaaggaccacgagcgatcgtttttttggcgatcggatgactgggtgtagtaataacccacgccccacgaaacgcctcgccaggcgctgtaaaaaccgagatggatcgtttcatcgcggctctggcggtgccagtactcctgcgaccaggcggaaatcgccaggctgctcatgccgccaaatgcctgagaaagggagacctcttcgcggctgcgcttgttatccagcaggccattgcggctctcaagcgcgctggcttcgctgaagtcgtaataacctcctgaggagtagcgatagctggcgaggctaaatgaggtgccggtgccggcaaaatccttctggtactgcacccgtaccgaatggccggccgagcgctttcccgacggcgtcgtggtgttcgcccatgtcgcatcgcctccaagcgatccgagctcgccaaaaccgcgcccgacgccgagcgcccacgactggtaatcctgcgccagctggctaccgccgtagagcgtgaattcagccggtagcccataaaagagcataccctgcaaaaacgtcggcgagcgcgcctggctctgctccgaatggtagcgtccggcgctcaggctgaatttcacgcgtccttcccgcagcataaacgggacggctgaaaagggctgggtaaaggtccgcaccgaaccatcgctctcttttacctgcacctcgagatcgccgctttgcgccgttggatagaggtcgtttatcgcaaacgctcccggcgagacgaacgtttcatagataacgtagccatgctgggagatggtgactttggcgttgctgtgcgccattccgcggatcgtcggggcgaagccgcgctggctatccggcagcatttcatcatcggacatcagctgaacgccgcgaaactgcacgctgtcgaaaacgtcgccggtcgtaaaggtatcgcccatccgcagcaggcttttgagtgacttcaggtcgcgctgtagccaggtactctgtgaattccagcgccgggtccggtcatactccatcgacgagacgttacgcaggcgccaggcaccgaggttaaccccgctgcgtagattcaggtagctggagtggctgctgtcatccgtctgccgggtttgcgacccggtcaggttatagttaacaaacgccgccgggataccatcatcccagcgtgccggatccacgtatccgcggctctgggcgttcatggccgcctggggaatacttaagttcagacgctgagtggcgaaatcaaaacggctgctggcatcggggatgtagcgctcgatgcgagtaaacgtttctccctcatgcagggtattaaacgccgggaaagcgctgacgttgacgccatattccgccagctgcgccggggttaactgcggccgcagttcgccgttgctgtcgacaaatgtcacctcgccctgggctatctcctggttattcacccaaatgctgaccgggtatgtcccgggctgctggccgcctgctttagcaaaatagtgtaaatcagcggtcttttgctgcggattggcaaattctaatgccgccggatcaaagtagtcctccgcccgcgcgataccgctttggtacagcagaaaaagcgccgtcggcaataataaaatcccgccggttggcgccgcgatcgccgaataaacgggagtcatatccgaagtgttatttttcacaatatcctgaccaggcgaagcaaattaattactgttgtgcgtaatccgtaataccaccgaagtcattaatggcgcgccatttaactaccccggaatgagtaatcggccacgctttatgatcaaaggggccaatcatgccgggttgcagaatatctgtaccgccaaccgaaataacaaaaaaggagacaaaatagggcgtcgggttttgggcaaccagcctggaaccttcaatgttaaacgtcagcttgcgccatgcatcgtcaggctcgcccgccagaccattcgggcgatagaagatcttaaactttgatttaatattgacctgaagcttgttcacttcatcttgtttcgttggagcaatacttttcacattgagccaaaaaacggattcgcgatcggtgggcagcgttccaccaatatagttaatacgcaatacgttctgctgttcaggatcgagacggaaaagcggcggcgtcacaataaaaggcacccggcttttattgttttccgcatagttttctacccacgattgcaccagataaggtgaatgagtatcagcgttggtaaccgatattgcggcttcacgtttcccttcctgataaacaacacgggttcctcccatgacaataccggcctgtgccgcagttgatagcaataaaaaggctatcgcggcgatcgttcgtttcataatgactaccgtccgggaataataaaagcgggtatcactgcctgaagctgataaataatctgcattaattatgccgaccctatttcagccgggcggcggctggcggcttacccggcgtgggaagccatgaataaccgcagctttacccgcttccagggtattagttgtaaaccatattgaagttggccgtaccgttggcagaaccggcggaaaccgcgctggttgagacatagtcagcaaagaattccaaatcggcggtacccgttgccgcgccgctcgcgccagcggtaacgctgtggccgcgtgagacggcgccgagatcaaccggcgtcgacttatcatcttcatacagctttatcgctaccccacttgcggtaccgtttatcgccagcagatcgctattgttggtatcgcgggtaccgtcaaacagcaccgagacggtggtaacggtagaaggacaatctttcactttgatatggaaggcggttttggtcgtttcagaacctgcgccggtaaaatagctgctcgcccatttccccagatcgacgctctgatttgcgctggtgctatcaacattacaggaggaatcggtaatcgatccggtaaattctacctgcccacccgtcccctgcgtgcccgcattagaaccggggttaacggtcattgccgatctggcgggttgtgaaggcgaggataatgcgctagcggacaccagagcaccgacaaacattgccataatacgaaattgcgttttcattattcatctcatctctaacttatattttcgacagattgcgcgcgagggattaagccccgggcaaatctgcgtgcagatcctccatgttaataatattcgcgttccgtccgcaggacatcaggcagcaaaaataagctgcttaattggctattttgataaaaagaagttcttcggcgaaattgataaaccctttattaaggtaacaaataaatactatccctaccgattacaaatcgcaatattttgttatgttaatgaaatgctgttttattttacatataaagataatattaaaaacattatgcgcattgttaattaatgcaaccaaaaatcacgatacaataacatcaaaaagcaacatcaggcggcgtaatttaacaaccacccctaatttcaccgcgatttttcggcaataattctgtgagcggactgggtttttatagaatattaggataaatcttagactggcttttatcttattttcgttatcgaataaacaataatcacgcgagtcattataagcaggagatattgatgacaagtgtatgtcatctgaaagccggagaggaaagatgaataacaatactttctttgtggaataataaacccgcaatcgatgctgaagattgcgggttatcctaaaataaatagctgacagggacgatcagaacaggcccagcggcgcggtaccgtagctcaccagcaggttcttcgtctgctgataggcattgagcgccatcttatgggtttcgcgccctacgccggactgtttgtagccgccgaacgcggcgtgcgcagggtagatgtgatagcagttggtccacacccgaccggccttaatgccgcgccccatgcgataagccaggttggtatcccgcgtccacaccccggccccaaggccaaactgggtttggtttgcaatagccagcgcctcggcttcatctttaaaggtggtgacgccgataaccgggccaaagatctcctcctggaagctgcgcatatcgttgcgaccctgaatcagcgtcggctgaatatagaaaccgttatccagttcggcagagatgctggcgcgttcgccgccggtcaggatctttccgccttcatcgcgagcgatcttaatataggaaaggatcttatcgaactgctgacgcgacgcctgcgcgccgatcatcgtatcggtatcaaaggggtcgccgcggcgaatttgcgccaccttctccatgacccgcgccataaagggctcgtaaatagactcctgaatcagcgcgcgggacgggcaggtgcagacctcaccctgattaaagaagcccagaaccaggccttcaaccgccttctcgatatactcttcttctccttccatcacgtcggcaaagtagatgttcggcgatttaccgcccagctcaacggtacaggggataatgttttccgccgcgcaggccatgatatggcggcctaccggcgttgagccggtaaaggcgattttggcgatgcgtttactggttgccagcgcttcacccgcctctttgccaaatccctgaaccacgttaaggacgcccgccgggaacagatcgccaataatctccagcagcaatgtaatgctgagcggcgtctgctctgccggtttcagcaccacgcagttgcccgcagccagcgccggagcgagcttccaggcggccatcagcagcgggaagttccacggaataatttgtccgaccacgccgagaggctcatggaagtgataagccaccgtcgtttcatcaatctccgccgtgcttccctcctgcgcgcgcaggcagccggcgaaatagcggaagtgatcgaccgccagcggcaggtcggcgttgagggtttcgcggatcggcttaccgttatcccagctctccgctaccgccagatattccaggttggcctcaatacggtcggcaacctgcagcagcagattagcgcggtgctgagccgacgttttgccccaggcgtcggcggcccggtgcgccgcatcaagggcgaagtcgatatctttggcatcagaacgcggaaactgcccgatgttgctaccgtcgaccggggaggtattcataaagaattctccaccgatgggttcaacaaatttaccgtcaataaagttaccgtaggctgacttcagtgaaaccaaagcgcccggtgtgccaggatgagcataacgcatcgcgaatctccttcatgtagggttgagggcagcggcatattagttttgtacggcggctcgctgcgtctctcgtctattgcaggggttatgccattttttatattttaaaaaagaaattaattttcaataaattagataggtcacgtcactttctgtcgcacagaatctctcttatgtgtcgcaaatcgcaacacaacgaaaaccatatagctacaatattgcaacacaaattaaacgacgaggtgtcccgtgccaggaaatccgtttgccctgacgccagagatcgaaacgaacccgctgctcagcgactcctggtgccgtagccagcgctatggcctcgaccccgccacggatgacttccctcgcctgcacgccagcgaactggccgacaggctcgccagacacagccgcctgcaaacgctggcccagccggtcgttaatgagctatcccgcaaagtcaacgctctgcaatccgtcgtggttctctctgacgccagcggtctggttttgcaaacctttggcgatacgcacgccatgcagaaagcgcagcgcttcgctttagcgccgggcaacctgtggagcgaaagcggacgcggaaccaacgccattggcaccgcgctggcaattgacgacagctgcgaaatcgatggccgccagcattttctgaccagtaaccagggtctttattgcgccgccgtgccgctgcaaagtcccgatggcaaaatagccggggtgctggatatctccggcccggcccggtacccgcacgcccgcacgctggcgtgggtaaaaggcgccgcgaagcagatagaatatctgtgggttaaacagagtctgcatccgcaacagtggctgatgagcctgcatcctcagctggaaaagctcgacggcgtcgacgaatgtctgctggtctttaccgacaatgtgctgatggcggctaaccggctggcgatgcgcgagttctcacttaacgcagatcggttcggccacctcacgttccagcagctttttccgcagctgcggcaaaccgccgtcagcgtaccgctgccgctcatcgccggagatcgaaactactattaccgtctacgcgctcccgtgaccgctggcgtggcggtgaccgcgcgccccaccctcgagctgcctttctccagccagcgcgaaggcgaaaagctgctgcgcctgcttaacgccgggattgggttgtgtatcgaaggcgaaaccggctgcggcaaagagtacgtcagccgtaccctgcatcggcacagccgctggagcggcggcaaattcgtcgccatcaactgcgccgcgctgccggaatcactgattgaatccgagctgtttggctaccagcccggggcgtttaccggcgcaaacaaaaacggctacatcggcaaaattcgcgaagccgacggcggcgtactatttcttgatgagattggcgatatgccgttaacgcttcagacccggctgctgaggatcttacaggagaaagaggtcacgccgcttggcgccagccagagctcgccggttaatttcgcggtgatttgcgccacccaccgcaatctggcgcagcgcgtcgcggaaggaaccttccgcgaagacctgctctaccgcctgcgtgagtttgctttaacgctgccgcccctgcgcgaatggcctgaactgtccgggtttatccaacgattgtggcacgagctgggcggagaaaaacgtcgcatcgcgctggccccggaagttgtgcaacacctgacgtctcatccctggccgggcaacgtccgccagctgcaaagtgtgttgagggtactgctggccctcgccgaagagggtgaaacgctggggatagatgatttgccccaggagtatcgaagcccgcccgccgcccgcccgctgcgcgggcttcagcagcacgatgcgcagctgattgccgacacgctggcaagctataacggcaacatcagtaaggccgcgcaggctttaggcgtcgcgcgcagcacgctgtatcgccgtgcggcccgtcgcggaagccatagcgcatagccttctgattcgctcagggcgtgaagcgcggcggccataataccgccattagtattaccaggtttcagccgcgctattttgtcacagcggcatccattgctggcgtaatacgcttttttattttagactttactaaatttagaaaaggctaaaataaatgaatacacccgaacagctacaggccagcgccggcgaagccgccgcgctgctgaaagccatgagccatcccagcaggctattgattctgtgcatgctatgcgatgcgccgggcaccagcgccggcgaactggcgcggataaccgggctgagcccctccgcaacttcccagcatctggcgcggatgcgtgatgaaggcctgatcggctgcgaacgtcaggcgcagcgcattcactacttcattacccggccagcggttcagcaaatcgtcgccgcgctgaagtcaatctattgtccttaaggagcctttatgcctattgctactctttcgcctgccgaagcccaggcgctcgtcgcccggggcggccggctgatcgatatccgcgatgccgatgaatacgcccgcgagcatattcccggagcggagctcgtgccgctggcgacgctgacgaatggcgcagcgctgcacgccagtcccgaagagacgattatttttcactgtcaggcgggatcgcgcacccaaaataacgcggcccgtctggcgcaggccgccgcaccggcgcaggtaaagctgctggctggcggaattcaggcgtggaaagcggccggtctgccggtgaaagaggataaatcacagccgctgccgcttatgcgtcaggtacagatcgtcgccggcgccctgattttgcttggcgtcgctttaggttatgctttcagcagcggcttttttctgcttagcgccttcgtcggcgccggcttaacctttgccggtattaccgggttttgcggtatggcgcgtcttttggctttgatgccctggaaccgtcgctagcctctacctcttttgagagactgttggtaacgcttttgctgagctatggttatgtcagcgaaaagattcatcagcacacaggagaagcagtatgttttcagtcggtgacctggtacaaccgcgcgcgggtgggccaaaacttaaagtcgttgaagtccaggacgatcgcattattgccgttcaggcaagcaacgagcagggtgagaaatatacgctgaaggccgccgatgtgacggcttataaagaagacggcgattttggcgtgtgctgattaagccggctaacgataacggtgggtctccccaccgttttcaatattagatcaggaagctatcgagggattttccctcagccaccgctttagccagtggcttcggcatacgtccctgcccggtccaggttttctcggcgccggtatggtcggtaaaacgatatttagccggacgcggctggcgctttttgctccctttcggggaagcgctattgtagcccgctaattgttcaggggtaatgccgtcagccatcattaattccagccaggtatttattttttcctgatgttctgcgcgcagcgcctgagccgcctgctcctcagcgcgtttttcttcagtgacggtccttagctttgccagcatatcttcaagcacgtcaatggagaattcacgggacatggcgcgaagtgaacggatattattcaatttctctaatagtaatgacatataattcaaaaaattcccaaatagcaaatgaaacaaagattacggcgctagtttaattgatatgataatgtatttccagcctttcactaattcctgatatagcaccagaaatgtttagcaattaataaggcgaacaaatcgataaaagcgaaattatcaacactgaataaattcttttgcaaataatactattcgccaggcaacgtctttatcttattacctgtatgctcagcaggttatccgtatatttacggttgcgcctcgcagggcgctacgggcgtttatagaatagtcatgcaaaaaatccgaatgtccacccagcagacaaatcagcatataatgctgccattcctcttttatacgtgtaaaaaacgccaaaagtgacacaactcacaccgctacgcgattctgtcgcgaaatcccccctcacaacccggattggctctcatctatatgacgcatttattttacaaccaattgaaaaacaataaaaaaatcagtaaagagaacaaaagtagcgtaacgaacaaaaaatagcctgacgcagagtattttatcgaccaaaagcctttaaataaaaatttatagctagttgcctcttttaatgcagagatataatctacgcacatcaaaacaggcacccaaaaacgctaaataaccgcgaatcttttggcattatcgacttcattttcgaggagcataccaatgttctctgcgcagtcccgcttgcgtcatgcggtagcagacacctttgcgatggtggtgtactgcaccgttgtgaacatgatgatcgaaatttttctctccggaatgactttccagcagtcgttatcttcgagactggtggcgattccggtgaacattattattgccgtgccttacggtttttatcgagatttcgcgatgcgccaggcgcgccgcattagcgcatccggctggatgaagaatattgcggatgtggtggcctatgtgacgttccagtcgccggtatacgtcgcgattctgctggttgtcggcgccgactggcatcagatcgccgcggcggtaagttccaacatcgtggtatcgatgatgatgggcgcagcgtacggctatttcctcgactactgccgccgcctgtttcgcgtcagcccctatcagcaggccaaagcctgagttgatacaaaaaagcgactggttcagccagccgctttttgtcagctatactgcgtttcgccaaacaggccactcagaaaacgctcaagcgccatgcgcgaactgaacccgtgtggaataccataatgctgctgagcatcgcccgctaaatagagcgggaactgctcgtagtgatcgcaggttttaatatccgacgcgggctccgcaagcgttgtgctgcgctcttttaaagccggatgaataattaacgcggtacgccccatacgagcttcacggttcacataaacataattatcgccacggcgatagccgtacgctttttgcgtcacaacatccatggtgaagccggctttttcaagaacacgcgccacctcatcgggtcttaaatacatactcattcctcattatcttttaccgcacgttaaccttaccttattcattaaaggcaacgctttcggaatattccataaagggctatttacagcataattcaaaatcttgtcctacacttatagactcaatggaataaagggagaaaccaatggccaaccgagcaaaccgcaacaacgtagaagagagcgctgaagatatccataatgatgtcagccaattagcggatacgctggaagaggtgctgaaatcatggggcagcgacgccaaggacgaagcggaggccgcgcgtaaaaaagcgcaggcgctgctgaaagagacccgcgcgcggcttaacggcaataaccgcgttcagcaggcggcgtgcgatgccatgggctgcgctgacagctatgtgcgcgataaaccgtggcaaagcgtcggcgccgcagctgccgttggggtatttattggcgtattgctgaatttacgtcgataataaaacagccagacccatgaagataacaaatacgcgtctacccctgccctgcaggggtttttgttatctctgcgggtaaagcgcgacataaagcttacgcacagcctggttcgccatttcttccgacgtcaggttggtgaagctcattatcagccccccttctccccgagcctccatccgccagtcgctcagcgcctgtacggccagaccagcccgtctggcgcgctgcgccagaggccgatcgtctccggcgaccctgaccaccatctggatcccgcccgcctgaggcacgacggtgaatccctgcgcccgcagcgccgactcaagccacagtcggcgctgggcatagctggcgcgcattttcttcagatgccgccagaaatggccttcgcgaataaaatccgccagcgtctgctgccacagcgtcggcacgctacagcacatcagcgcggcccgttcacgaaactgcgccaccagcggctcaggcaccaccagccaggcggcgcgtaatgccgggaacaaagacttgctgaacgccccggcatagatgacccgctgcggggcgtcgaggcttttcagcggcggcagcggcttaccgtgatagcggaattcgctatcgtaatcatcttcgataatccacgcgttattctgcgccgcccatagcaggagctgtctgcgcctggccagcgatagcgccacgccgagcgggctttgatgagccggggtcagcagcgcgaaatgggcactcgggtaatgccgctgcgcccagggaatatccatcccgtcgtcgtcgaccggaacgggattgatcgccaccccctcatcgttcactaccggccggatcagcggaaatcccggatcttccatccacatttgctggccaggccgcgccagcgtgcgcaaaataaggcgcatcgaggccgcgtagctaccggtgatcaagacctgctcaggccgacactcaatgctgcgcgacagacgcaaataatcgacgatcgcccggcgaagcgtcggttcaccgcagggatcgcctggcgcgaggtcaaaacgcgtttgcgtacgcagacgccgccccatcacgcgcgcccacaggccgcgtggaaacagatccagcgcgggcagccccagctgaaacggcagcggcgccgcggtttcatcgcccgcgatgggctgaacgggcgcgttttgctgcggcagcagccgatcgctgacaaaggtccctgcctgtccgcgccgctccagccatccctgcgccaccagatctccccacgtgttctcaatcgtcgcccgcgacacgccaagctcctgagcatagacccgacttgcaggcagcctgctgcccggagccagctcgccgcgctcaatcgcctgcttaagttgtcgggcaatgcgctggtagtgcggaatttttttaccgtccatcatggtctgcttttttcatcgcaatatggctatcttatgcagtccattatagtgctattttcctcgcgtcttaatgaggagagtaaaatgaacacactacgtcagccgtacaatgaactgagcccggaagtctataacgccctggttcaggccaaaattgcgctggaaaaaagcgagctggatggcgcgctgatcgagctggtgtatttgcgggtatcgcaaatcaacggctgcgccttctgcctggagatgcacagcaaagccctgcgtaaatccggcgtcgcgcaaaacaagctggacgcgctggcaggctggcgggtgagcgcccatttcagcgatgcggaacgcgccgcgctggcgtgggcggaatcggtgacccatatcgccgaaagccatgcggaagacgccgtttatcagccgctactggaccatttcagcgcccgccagatcagcgatctgaccttcgccatcagcctgatgaacgcctttaatcgtctggcggtgagtatgcgcctgtaatttcacggcaagaaatcccgccccccgccggatcctcccgcgggggctaacctttacaaaaaccatatatattgagttgttgaacttttaaataactacatctagtatttccttcaacgataacccatagcacgcgacgtcaatttttacgtcgtactgttatcttaaatggaaatacgaatcatgcgcattactatttacactaaaaacgactgcgtgcaatgccatgccactaaacgggccatggaaacccgcgggtttgaattcgatatgatcaacatcgaccaccaccctgaagccgtcgatatgctgcgcgagcagggtttccgtcagcttccggtagtgattgccggagagacccgctggtccggcttccgtcccgatatgatcaatcgcctgcgcccgacagcgtcagcggccagcgtatgagcctgatcgtctacttctccagcagttccgaaaatacgcaccggttcgtccagcgtctggagctgcccgccgtgcgtataccgcttaacgaacgcgagcgcatccaggtagacgaaccctacattcttatcgtccccagctatggcggcggcggcacggcgggcgcggtcccccggcaggcgatccgtttcctcaacgatccgcataaccgccagcttattcgcggcgtcatcgccgcgggcaatcgtaattttggcgaggcctacggccgggcaggcgacgtcatcaagcagaaatgcggcgtaccgtatctctatcgctttgagctgatgggcaccccgcaagatgtcgacaacgtgcgtaaaggagtaagcgaattttggcaacgacaaccgcagaacgtataaccaccgaggcgccggatttccacgccctcaacgcgatgctgaatctctacgacagcaacggccgcatcccgtttgacaaagaccatcaggcggtagcggcgtttatggccaaccacgttgagccgaataccgtgccctttaccagccaggacgacaagctgacgtggctggtcgccgaaggctattacgacgccagggtgctggcccgctacgatcgctcgtttattcttgcgctgttcgcgtacgctcagggctacggttttcgcttccagacgtttctcggcgcatggaagttctataccagctacgcgctgaaaaccttcgatggtaagcgctaccttgaagactttgccgaccgcacctgcatggtggccctggccctggcgcagggtaacgaggcgctggcccggcagctaaccgatgagatcctctccggacgttttcagcccgccacgccgacgttcctcaacgcgggtaaacagcagcgcggcgagctggtctcctgctttctgctgcgcatcgaagacaatatggaatccattggccgggcggtgaactcggcgctgcagctatccaagcgcggcggcggcgtggcgtttctgctctccaatcttcgcgaagccggggcgccaatcaagcgtatcgagaatcagtcctccggcgtggtgccggtgatgaaaatgctggaagacgccttctcctacgccaaccagctcggcgcgcgccagggggccggcgcggtctatctgcacgcccatcatcccgatatcctgcgtttccttgataccaaacgcgagaacgccgatgaaaaaatccgcattaaaacgctctcgctcggggtggtgattccggatatcacctttcagctagcgaaagaagatgcgcagatggcgctgttctcgccctacgacgtcgagcgcctgtacggtaaaccgttcggcgatatcgcggtaagcgaaatgtatgcacaactggtggccgacgcgcgggtcagcaagcgctggatccgcgcccgcgatctgttccagcggctggcggaaattcagtttgaatccggctatccgtacatcatgtttgaagacacggttaatcgcgcgaacccgattgccgggcgcatcaatatgagcaacctgtgctcggagatcctgcaggttaacgcgccttctacctttgacgaaaacctggattacgccagcatcggccaggatatctcctgtaacctcggctcgctgaatatcgcccataccatggactctcctgatttcgcccgcacggtcgaggtcgcggtgcgcggtctgaccgcggtgtccgaaatgagcgatatccgttcggtaccgtcggtcgcggcgggcaatgccgcttcgcacgccatcggcctcgggcagatgaatctgcacggctatctggcgcgcgaaggtattgcctacggcagcgaagcggggctggatttcaccaatttctatttctataccatcacctggcacgcgctgcgtacctcgatgctgatagcgcgggaaaaaggcacgcgttttgccggattcgagcagtcgcggtacgccagcggtgattatttccgcccctacctggaaggcgactggcagccgaaaacggcgaaagtccgcgcgctgtttgcccgtgccggtattgccctgcccgaccgcgatatgtggcggcagctgcgcgatgacgtgatgcgctacggcatttataaccgcaacctgcaggcggtgccgccgacgggctctatttcgtacatcaaccacgcgacctccagcatccatccgatcgtgtcgaagatagagatccgcaaggaggggaaaaccgggcgcgtttactatccggcgccgtttatgaccaacgacaacctggcgctgtatcaggacgcttacgaaatcggcccgcagaagatcatcgacacctacgccgaggcgacgcgccatgtcgatcaggggctgtcgctgaccctgttcttccccgataccgccaccacgcgcgatatcaataaagcgcaaatctacgcgtggaagaaaggcatcaaaacgctctattacatccgtctgcgccagctggcgctggaaggtaccgaaatcgaaggctgcgtgtcctgcgcgctgtaaggagaacaggatgacccatttatcgcgcatcagcgccatcaactggaacaaaattgaagatgataaggatctggaggtctggaatcggctgaccagcaacttctggctgccggagaaggtgccgctgtctaacgatatccccgcctggcaaacgctcaccccggcggaacagcagctaacgattcgcgtcttcaccggcctgacgctgctcgataccatccagaataccgttggcgccccggcgctgatggccgacgccctcaccccgcatgaggaagcggtgctgtcgaacgtcagctttatggaggcggtgcacgcccgctcctacagctccattttctcgacgctctgccagaccaaagacgtcgatgccgcctatgcctggagcgaacaaaacgcgccgctgcagcgcaaagcgcagctgatgctggagtactatcaggcagatgaaccgctgaagaaaaaaatcgccagcgtctttctcgaatcgttcctcttctactccggcttctggctgccgatgtacttctctagccgggggaagatgaccaacaccgccgatctgattcgcctgatcatccgcgatgaagcggtacacggttattacattggctacaaattccagaaagggctggaaatagtcagcgccgagaagcgcgaggagatgaaaaacttcgccctcgacctgttgatggatctgtatgacaacgaactggcctacacccgcgaactgtacgccgatagcggctggattgaggaggtcaacgcctttctctgctacaacgccaataaggcgctgatgaacctcggctacgaggcgctgttcccggcggaaatggccgccgtcaatccggcgatcctcgccgcgctttcgccgaatgccgacgaaaaccacgacttcttttccggttcaggttcatcgtatgtgatgggaaaagcggaagaaaccgtcgacggcgattgggacttttagccttactttcaccaggaatatatcagcatatttcctggtgatttatttcacattatttgttttcgcctcactcaatatctttcggtcatcaccgtgtcatattcaacagcatgccctcgattttcgcctgaattaacgcaacataactaaaaaatatcgaccacaagtcattcgcgctcagcccttatatcacgggggatgcaccggaattctcccttgcacatttccctggcaacgccacataaagggttgtcacagattctcagtatgttagggtgtaaaaaagcaattatcatcaccgggtaccgtatcgatattaataaataacaggaaacactctattgcatggcaattaaattagaaatcaagaatctctataagatatttggcgagcacccgcagcgggctttcaaatatatcgataaaggactatcgaaagaacaaatactggaaaagacggggttatcgcttggcgtaaagaacgccagtctgaccattgaagaaggcgagatattcgtcatcatggggctctccggatcggggaaatctaccatggttcgccttctcaatcgcctgattgaacccacccgtggccaggtcctgatcgacggcgtcgatatcgctaaaatctctgacgccgagctccgcgaggtgcgcagaaaaaaaattgcgatggtttttcaatcctttgcgcttatgccgcatatgaccgtgctcgacaacgccgctttcggcatggagctggccggcgtgccgactcaggaacgccaggagaaagcgctggaggcgctgcgccaggtcggcctggaaaactatgctcatgcatacccggacgaactctccggcggcatgcgccagcgcgttggtctcgcccgcgcgctggcgattaatcccgatattctgttaatggatgaagccttctccgcgctcgacccgttaattcgtaccgagatgcaggatgagctcactaaattacaggccagacatcagcgtaccgtggtctttatttcccacgatcttgatgaagccatgcgtattggcgatcggattgccattatgcaaaatggtgaagtggttcaggtcggcacgccggatgaaatactcaataatccggccaatgattatgtccgaaccttcttccgcggcgtcgatattagccaggtgttcagcgccaaagatattgcccgccgtagcccggtggggctgattcgcaaaacgcccggctttggcccgcgttccgcgctgaaattgctgcaggatgaagaccgcgaatatggctacgtcattgaacgcgggaataagtttgttggcattgtctccattgattccctgaaagccgcgctaagcgaaggtcagggaattgatgcggcgttaatcgactcaccgcaggcggtggatgcgcaaacgccgctcagcgagctgctctctcacgtcggccatgcaccgtgcgcggtgccggttgtcgacgaggggcaccagtacatcggcatcatttccaaacggatgctgctgcaggctttagatcgcgagggggcaaacaatggctgatcaatctaacccgtgggacaccgcaccggcggcggatagcgcagcgcaatccgccgatgcctggggcacctctacgccggcgccgaccgatggcggaggtgccgactggctgagcagcgcgcccgcgccgcagccggaacacttcaatattatggacccgttccataaaacgctgatcccactcgacagctgggtcacgcacggtatcgactgggtcgtgatgcattttcgtccggtattccagggaatacgcgtaccggtggattacatcctgagcgccttccagcaactgctgctgggtatgccggcgccggtggcgattattattttctcgctgattgcctggcagatttccagcgtcggcatgggcgcggcgacgctgatttcgctgatcgctatcggcgctatcggcgcctggtcgcaggcgatggtgaccctggcgctggtgctgaccgcgctgctgttttgtatgctgatcggcctgccgcttgggatatggctggcgcggagcccgcgggcggcgaaaattatccgtccgctgctcgacgcgatgcagaccacgccggcgtttgtctatctggtgcccattgtgatgctgttcggtatcggcaacgttccgggcgtggtggtcaccattatcttcgccctgccgccgattgttcgtctgaccattctggggattaaccaggtgccggcggatctgattgaagcgtcgcgctccttcggcgccagcccgcgtcagctgttgtttaaggttcagctaccgctggccatgccgacgattatggccggggtcaaccagacgctgatgctggccctgtcgatggtggtcatcgcctcaatgattgccgttggcggtctcggccagatggtactgcgcggcatcggtcgccttgatatgggcctggccaccgttggcggcgtcgggattgttatcctcgccattattcttgaccgtctgactcaggccgtaggacgggactcacgcagccgcggcaaccgccgctggtatgcaaccggcccactggggctgataactcgccctttctgtaaataagagcccatccccccgacagccggggggatagacttcccttctgataaataaaaggaacaacgatgcgacatacagcgatccttgccacagcgttaaccgccctcatttccaccaccgccttcgcggcggatctgcctggcaaaggcattaccgttaagccgattcagagcaccatttcggaagagaccttccagaccctgctggtcagccgcgcgctggagaaactcggttataccgtcgataagccgagcgaagtggattacaacgttggctatacttcgctcgcctccggcgacgccacttttaccgccgtcaactggcagcccctgcacgacgatatgtacgctgccgccggcggggataaaaagttctaccgcgaaggcgtgtttgtgaacggtgcggcgcagggctatctgattgataagaaaacggccgagcagtaccacattaaatctatcgatcagttaaaagacccgaaaatcgccaaactgtttgacaccaacggcgacggtaaagccgacctgaccggctgcaccccgggctggggctgtgaagcggtgatcaaccatcagcttgatgcctatggcctgaataataccgtcacccacaatcagggtaactatgccgccatgatggccgacaccattgcccgttataaagagggcaagccggtcatctactacacctggacaccttactgggtcagcgatgtgctgaagccgggtaaagacgtcgtctggctgcaggtgccattctcctccctgccgggtgtgcaaaaaaacatcgacacgaagctctctaatggcgccaactacggcttcccggtcagcaccatgcatatcgtcgccaataaggcctgggccgagaaaaacccggcggcggcgaagctgtttagcatcatgaagctgccgattgccgacatcaacgccgagaatgccatgatgcacgagggacatggttcagaagcagatatccaaggccacgtcgacggctggatcaaagcccaccagcagcagtttgacggctgggtgaacgaagcgctggccgcgcagaaatagtctcccactttatagccaattcccggcggcgatgctacgcatctgcccgggctacaaaagccgtagcccgggcaaggcgctttgcgccgcccccggggaagaccgcatcctgcacaacacgacatctcctgttctaaatgatggattgatatgcaaataaactgcataactttagccatcaacgttttcgttactgttaagccgcaccgctctctgctaaggtaaatccacctgtttaatcatgtgattttcacgtgagttatcaataagcaattcctatggaaaatcctgacgcattgacgcactctcctcccgctgacgcggccacgctggctgaaggcctgaaagacagcctgccgatcgtcatcagctatatccccgtggccttcgccttcggcctcaacgccactaagctcggcttcactccgctggaaagtctgttcttctcctgcattatttacgcgggcgccagccagttcgtgatcaccgcgatgctggcggcgggaagctcgctgtgggtcgccgcgctcaccgtcatggcgatggacgttcgccacgttctctacggcccttccctgcgcagccgcatccagcgcgcgctgagcaagaaaaaaaccgcggtatgggcattcggcctgaccgatgaggtctttgccgccgccactgctaaactggtacgcgacaatcgacgctggagcgaaaactggatgatcggtatcgctttgatgtcctgggcgtcatgggtcttcggtacgctgatcggcgcttattcgggcagcggcctgctgaccgactttccggcggtggaagcggcgctgggctttatgcttcccgcgctgtttatgagctttttgctggcttctttccagcgcaagcagtcgcttagcgtaaccgccgcgctggcaggggcgctgggggggatcatcctgttttccattcccgccgccatccttgccgggatcgtctgcggctgtctgaccgcgctggtgcaggccagcattgaggggatgcccgatgaacagtgatgttttaattatcggcctcgtggtcggctgcgtaaattatctgttccgctatctgccgctgcgcctgcgtgccgggaacgcgcgtccgacgcgtcgcgggccggtcagcgtgctgctggacaccatcggcatcgcctctatttgcgcgctgctggtggtctccagcgtaccggaaattctccacgatgcccgccgcctgctgcccacgctggctggcttcgccgtgctgggcctggctttctggaaaacgcgcagcattattttgcctacactattaagcgccctaacctacggtgttgtctggaaaatcggcacatggctataagcttaaagtatcaatttctgtcaataattcatttgatttatttgtcacaatagttattatatcgactgtaattaatgaggtcataaccaaaatggatagttcgtttactcccattgagcaaatgctcaagttccgcgccagccgtcacgaagactttccttttcaggagattctgctcacccgtctttgcatgcatatgcagggaaaattgctggaaaaccgcaacaagatgctgaaagcgcaagggattaacgagacattgtttatggcgctgatcacgctcgagtctcaggaaaaccacagcattcagccttccgagctgagctgcgcgctgggctcttcgcgtaccaacgccacgcgcattgccgacgagctggaaaaacgcggctggattgagcgccgcgaaagcgataacgatcgtcgctgcctgcatttacagcttaccgaaaaggggcatcagttcctgcgcgaagtgttacccccgcagcacaactgcctgcatcagctctggtcttctttaagcaccagcgaaaaagatcagctcgagcacatcacccgtaagctgcttggtcgccttgaccaaatggaagaggatggcgtgcttgcggagtctctgcgctaagcgcggaaccaaccgctcaacaatttttctggattgacaaggaaaacggacaggccagcagatcttctgctggcctttctgataaacaggtcggctcagccgatgtgaaataataagatcgtggagaataacatgagcgcaaatgcggagagccaaaccccgcagcaaccgggcagcaaaaaagggaaacgtaaaggcgccctcctgctgctgaccttgctctttattattgttgccgtggcatacgggatttattggtttttggtactgcgtcacttcgaagagaccgacgacgcgtacgtggcagggaatcaggtacaaattatggcgcaggtgtccggcagcgtgacgaaagtctgggccgacaacaccgactacgtgcaaaaaggcgatccgctggtcaccctcgaccagaccgatgcccagcaggcgtttgaaaaagcgcaaacccagctggccgccagcgtacgtcaaacgcgccagcagatgatcaacagcaagcagctgcaggccagcatcgacgtgaaaaaaaccgcgctttcccaggcgcagaccgaccttaaccgtcgtattccgctgggggccgccaacctgattggccgcgaagagctgcagcacgcgcgcgacacggttgccagcgcgcaggccgaactggacgtggcgattcagcaatacaacgccaatcaggcgatcgttctgggcacgaagctggaacagcagcctgcggtactacaagcggccaccgaagtgcgtaacgcctggctggccctgcagcggacgaaaatcgtcagcccgattagcggctacgtttcgcgtcgctccgtacagcccggcgcgcaaatcaccaccaccaccccgctgatggccgtcgtgccagcgaccaacctgtggattgacgccaactttaaagaaacccagctggcgcacatgcgtatcggtcagccggccaccgtgatcagcgatatttacggtgacgatgtgaaatacaccggtaaagtggtcggcctcgatatgggcaccggtagcgccttctcgctgctgcccgcgcagaacgccaccggcaactggatcaaagtggttcagcgcctgccggtacgtatcgagctggatgaaaaacagctggcagagcacccgctgcgcatcggcctttcgaccctggttgaagtgaacaccaccgaccgcggcggcgagatgctggcaagccaggtacgcagctctccggtttacgaaagcaatgcccgcgaaatcggccttgagccggtcaataagctgataaacgacatcatccaggccaacgccggataattcggggtgagcgtaatgcaacagcaaaaaccgctggaaggcgcgcagctggtcattatgaccattgcgctgtcgctcgcgacctttatgcaggtgctggactccaccatcgccaacgtggccatccccaccatcgccggtaaccttggctcatcgttgagccaggggacctgggttatcacctcgtttggggtggcgaacgctatctccattccgattaccggctggctggcaaagcgcgtaggtgaagtgaagctgttcctctggtcgacggtggcgttcgccatcgcctcctgggcctgcggcatgtcaaacagcctgacgatgctaattttcttccgcgtgattcaggggatcgtcgccggtccgctgattccgctgtcgcaaagtctgctgctcagcaactatccgcccgccaagcgctctatcgccctggcgctgtggtcaatgacggtgatcgtcgcgccgatttgcggcccgattctcggcggctatatcagcgacaactaccactggggctggatcttctttatcaacgtgccgattggcatcgccgtggtggtcatgacgctacagaccctgcgcaaccgcgaaacccgcaccgagcagcggcggattgacggcgttggcctggcgctgctgattattggtatcggtagcctgcaggtgatgctcgaccggggtaaagagctggactggttcgcctcaaacgagatcatcatcctgaccattgtcgcggtggtggcgataagcttcctgatcgtctgggagctaaccgacgacaacccgatagtcgacctgtcgctctttaagtcgcgaaacttcaccatcggctgcctgtgtatcagcctcgcctatatgctctacttcggcgctatcgtgctgttgccgcagctactgcaggaggtatacggctataccgccacctgggccggtctggcctcggccccggtcggggtgatcccggtaatcctgtcgccgattatcggccgcttcgcgcataagctggatatgcgtcggctggtcaccttcagctttattatgtacgcggtctgtttctactggcgcgcgtggaccttcgaaccgggtatggacttcggcgcctcggcgtggccgcagtttatccagggcttcgcggtggcctgcttctttatgccgctgacgaccattacgctttccggcctgccgccggaacggctggcggcggcatcgagcctgtcgaacttcacgcgtaccctggcgggctccatcggcacctcgattaccaccactatgtggacgaaccgcgaggcgctgcaccatgctcagcttaccgaatcggtgacgccgtataatcccaacgcccagcagatgtacgatcagctgcagggattagggatgacgcaacagcaggcgtccggctggatagcgcagcagataaccaaccaggggctgataatctccgccaacgaaattttctggttctcggcggcaatatttatcctactgctcgggctggtgtggtttgccaggccgccgtttagcgccgggggcggcggcggcggcgcgcactaaggtttgacctgaagggatctgcggatcccttttttattgcccaacacgcaggttgtccggtttacgctagttgatgtccagttcgctggagatgccttttcgctctgtcgtgcacgatgaagatccgctaagaaggagaaaatcatgctgactcaacccggtgaaaaataccgtccctatccgccgattgccctgcccgaccgccgctggccggagcaaaaaatagcccgcgccccccgctggctctccaccgacctgcgcgacggcaaccaggcgctggccgagccgatggacagcgcgcgcaagctgcagttctgggacttgctgctggagtgcggatttaaagagatcgaggtggcatttccctcggcttcgcaaaccgatttcaactttgtgcgtcaactgattgaagaacggcgtatcccgcaggatgtgacgattcaggtgctgacccaggcgcgggaagatttaatcctcaggaccttcgaatcgctgcgcgatgcccaccgcgccaccgttcacctctataacgccaccgctccgctgttccgcgagctggtttttggaatgaacaaagcgcaggtggtcgagctggcgacccgcgccacccggcttatccgccagcagtgcgaacagcagccgcagacccgctggcaatacgagtattccccggaaaccttctgcttcaccgagccggaattcgcgctggagatttgcgaatcggtggcgcaaatctggcagccctgcgccgaacggccgatgattatcaatctgcccgcgacggtagaagtgagcacgcctaacgtttatgccgatcaaattgagtatttttgtcgtcacttctcgcgccgcgccgatgtgtgcatcagcgtccatccgcataacgaccggggaaccggcgtcgccagcgcggagctggcggtgatggccggcgccgaccgcgtcgaaggctgcctgttcggcaacggcgaacgcaccggtaacgtctgtctggtgacgctggcgatgaatctctacagccagggcgtcgatccccggctcagcttctccgaaatgaaccgggtggtcgaaattgtcgaaagctgcaaccagatcccggttcatccgcgccacccgtgggcgggaagcctcgcctataccgccttttccggctcgcatcaggatgcgatcaaaaaagggttcgatgcccgccggcccggcgaacgctgggaaatgccctatctgcccatcgacccgcaggatatcggctgtagctacgaagcggtgatccgcgtcaacagccagtccggcaaaagcggcagcgcgtggctgattgagcagaatcatggcctgaagctgccgcgcgcgctgcagcaggattttagcctgcacgttcagcacgaaaccgatacgcatggtaaagagatgacccagaacgcgctgtggcagctgtttcgcgcccgctacggacttctgccccagccgccgcttgcgctgctggattaccaaagcgatagccagcaggacggccagctttctctgcaggcgaccctgcgcatcgccggtgaaacgcgacgactgcagagccgcggcaacggcctgctgtccgccgccgccagcgggctgagcggcctgttaaagcaacacatcgtgattaaagattatcatgagcataccctcggcgaacgtagcgacagccgttcagtggcctatattcgctgcgtcttcccgaatggcgacagccgctggggggtaggaattgatagcgacgtggcgcgcgcctcgctgcaggcgttgtgcaatgcgatgagcgcaggccattacgccggcgagcggaagtagtcgctgggggccacgcctatcacccggcgaaacatggcgctaaaagcgctatggctgccgtagccgagatccagcgccacccgcaataccgaatgcccctgtgccaggcgaaccagcgcttccatcagcttcgcccggcgcacccactcgctccaggtgagcgaggtctgctgctgaaaatgacgattcagcgtgcgctcgctcatgctgctctccttcgccgcctcggcgctgctccagggttcgccgggcgcttctcttaccttctggcataaacggcgcagcgcttcgctttgcggctccggcaggccaaacggcagcactgccatgccgcgaatttcatcgaggatcagttcgtaaatgcgttcatcgcggctgtccggcgcgtaggattccgccagcgtcagcgatgcgacgatcagttcacgcagcagcggagtcacctggactatctggcaggatgaggggagatcggcccgggcaaggggatcgataaacagggttcgcgcggccgcgacgccggtcacccgtagggtatgcggcgtaccggcgggcagccagacgccacggcccggcggcacaacccaataaccctgcgcggtttccacccgcaccacgccgctgaggatatgcagcagctgggcgcaatcgtgctgatgccagggttcgctatcgccatgggcgtaatcatgggcaaaaggcaccagcgaacggtgttgaaaattgaaggttaaagtcgtcgacatcgcggcgtcagggagtagcggcccgacgcggttcgccgggccgtggcagaagcactagatgtgcagttcttgcagtttttctttcggcagcgccagctcatcgttgctgttgacgcggacatcgcgctcaataatatggcgagcgatttcctgagcttcctccagcgagtgcatggtgtaggttccgcactgataaacgttcagctccgggatctgattctgatctttcaccttcagcacgtcagccatcgccgctttccaggcatccgcgacgcgctgctcgtccggcgtaccgatcaggctcatatagaacccggtgcggcagcccatcggagagatgtcgataatttccacaccgttgccgttcaggtgatcgcgcatgaagccggcaaacaggtgctctagggtgtgaatgcctctttccggcatcacttcctggtttggcacgcagaatcgcagatcgaaaacggtgatttcatcgccgtgaggcgtgttcattttcttcgcgacacgcaccgcaggcgcttccattcgggtatggtcgactgtgaaactatctaacaacggcattcttcacctccgatagtgattttttttaaaataaaatgaactctttttgaggccgcgagtctgagtatatgaaagacgcgcatttattatcatcatcatccctgaatcagagatgaaagtttggccacagtgatgtggccgttttcttttttacggctcgtaaaactacgcgtgccgtgtcagcagcgcttcaaacggctcgctatccgccgcctccaccttcttctgacgctgtaccgatgcttcacgctcggcgacaaaatccgcttcgcttaaaatttccagcggctcttcgcgcagcatcgtccgataccgatcggccagttctctgccggtaccgccaatcccctcttcaagcatagaacgcagaatgcgcgccgagaaggttaattccggattatcgaagcaggcgaccagctcatcgcagacctgctgataggcctggcatccgtggatgctatccagcgtttgcgccacgcggcgtaaatcgcggaacagatctttgccgacctgagccagcgggaactgagcggtttcgcagccaatacccagcgtcaggcccggcttacggccttccagaatcacccgattccagttggtgcgcgtgcacagcagctcgtcgctgctcatctccggcgcatcggccagcacgcaccagaccataaacagatcgaggaaacgcacctgctgctcatcaacgccaatcggtgagaacggattgatatccagggagcgaacttcaatgtactcaataccgccgcgcagcagcgcgtcggaaggcgtttcgccgctgcgggtcacgcgtttcgggcgaatcggcgcgtacagctcgttttcgatctgcagcacgttgctgttgatttgcagacgcttgccgtctttctccagcccaatattttcatactcttcggaaggcgttttaatcgcccgcttcaatcctgccacatactcgtagagatcgttaaacgtaattccgagattgctttgcgatttattggtatagcccagatcgctcaggcgcaacgaggtcgcataaggcaggtagtacatgccgttgccggctttctcaaacggcagcgccgtcggtttgccctgcaggaacgacgagcagatcgccggagaggcgccgaacaggtatggaatcacccaaccaaaacggtaatagttgcgaatggagcggaaatagcccgctgaaatcgcctctttaccgctttcagcatcctcaacgccgcacttagcctgccagaaagccatcggcagcgagaagttatagtgcacgccggagatggtttgcatcagcgcgccgtagcgatttttcagcccttcgcgatacagcgttttcaggcggccgatattagaggaaccgtactgcgccagttcaatatcctggccgggcgcgatatagcaaggcatgctcagcggccacatccgctcgtcgccaatatggcgtgcggtatagcgatgaacatcgcgcatgagggtgagcatatgctggatatcgccatcaaccggcgtaataaattccagcaaagcttcggcaaaatcggtggtaatccatttatgagtcagcgctgaacccagtgcctgcggatgaccggtagtggccagcgtgccgtcagcgttgacgcgcagcgtttcgcgttcaagaccacgttgaataccctgcagcgcctgcggatttttttccagccaggccagcgcctgtgatacgtccgggatcaatttgacctcccgcctgtcgaaatcgtttgaattagcataattgtcatggttgaaccgtcagtccaattagtgccaccacgtcatgccctgaagcgttatcgccgcaatgacgatatagcgtaatgctttgccaaggcataaaaaaaagagcactggtccccaggaaatgcgcatccatcccgccagtaaacacagcaaatcgcctataacaggcgcccagcttaataatagcgtgaccgcgccgtaacgcctcagccagccggacgccttctcctgccagcgcgatgttttgcgcagcggaaacaggcgccccagaataacgttagttacccctccaaggctattaccgattattgctattaaaaccagtaaccacggctgactcccccccgccaggagcatggcgatcaacaccacttccgagttaccgggaagcagcgtggcgcttaaaaagctgctggcaaacagcgatatcagcgacagcgcgtcgctcacaacaatcgcacgtccacggcatccattccggcccgcttcgccgcctgcagaccgaagtccgcatcttcaaagaccacgcatttttccgccgcaacgcccatgcgctcagcgcagagtaagaaagtatcaggtgcgggtttatggttggcgacatgatcggcggcaaccaccgccgagaagtagtgacgcaggcccagatgggccagcagcgcttcagcaacggcgctctcgctgccggtaccgactgacatcggacgacgaccgtgccactctttaaccacttcaatcagcggcagaggacggacgctatcaagcagcatcgctttcaccgcgtccgtcttttcccgcgccagaaggtgaggatctaaatcagcctggtttaattcgataatggcctgagcaatccgccaggttggagagccgttaagcgcgaccatagcctgcatatcaaaacgcataccgtaacgtccgagaacctcgttccatgccttacgatgcgtcggctcggtatcgaggatcgtgccatccatatcaaaaatcagtcctgcataacgttcgtacatcgtcttctcaccaaccggttaaggaggtcttactgtaacgcaaaaggtcaggtttgtcgctgccagcggcagatgcgacaagggcgctcgaaggcgcccttgtcgatacagatgcaatctgatgcgtttatttgattcttaaatcgttctccaccacgcgaacgccctgcacttttcgcgtcacttctaccgcacgtttagcgctttcggcggatgagacaaagccgctcagctgtacacgacctttaaaggtctggacgctaatttccgaagacttaatctctttatcattgaagagcgcggttttgactttggtggtcacgacggtatcgtcaatgtacccaccagtactttcctttgtggacgaacctgcgcagcccgccagcgatacggcgaccagaagcgtcgcgcaaaacgcagatattgctttgaaccatttcatggatttctctccttgcacttatctcacccaaaatcagatcgatatacaggaataaattatagtggaaagagggagttgccaatgaaaaaagtgctgaagaataaggtgaatgattgcgcttaaggggttttgaggtaaggagagtggctggccgtgaaacaacagtgggttcgcccttcgggccgtttctgaagcaacgttatcctccctggcgctggcgattatctcgcagaccatggaacaatagcgtagctgctatctcggagaagatggtgcatccgggaggatgactcactgggttcgcccttcgggccgttgctgaagcaacgttatcctccctggtgcttgcggctaataccgccacctcattcacaccttcgttgctgaaggtatggagaatatggtgcatccgggaggattcgaacctccgaccgctcggttcgtagccgagtactctatccagctgagctacggatgcatcgggaaacttactttactgcagattttggtactgctgctaaagctgtatcaagtaagatggtgcatccgggaggattcgaacctccgaccgctcggttcgtagccgagtactctatccagctgagctacggatgcatcgggaaacttgctttactgccgatattgataccgctgctaaagccgtatcaagtaagagatggtgcatccgggaggatgactcactcggttcgcccttcgggccgttgctgaagcaacgttatcctccccggcgctggcgattatctcgcagaccgtgaaacaacagcgtagctgctatctcggagaagatggtgcatccgggaggattcgaacctccgaccgctcggttcgtagccgagtactctatccagctgagctacggatgcatcgggaaacttactttactgcagattttgatactgctgctaaagcagtatcaagtaagatggtgcatccgggaggatgactcgcccttcgggccgttgctaaagcaacgttatcctccctggtgcttgcggctaataccgccacctcattcacaccttcgttgctgaaggtatggagaatatggtgcatccgggaggattcgaacctccgaccgctcggttcgtagccgagtactctatccagctgagctacggatgcaaaatggcggtgaggcggggattcgaaccccggatgcagcttttgaccgcatactcccttagcaggggagcgccttcagcctctcggccacctcaccacacgcctcttacgagtgcttcgaagaacttgtttctgctcttcgtcgctgcgatggcgcacatattactttctggtacttataagtcaaaccttttttcgagacctttttttcgtttgcacacttcccgcgcaattagcctgtgaaaacggcaaaaagagtattttatcaacaagaaattgctgattacgccgcggctaacgcaaaagataactgtcgcggatgcggagaaagagacaaaaatgagaggctatcggagaggaaaattggcaaaaacggcgggtggaaggaggcgcctcacaaaatagcgaggcgcgaaaaccttagtaactggactgctgggatttttcagcctggatacgctggtagatctcttcacgatgcacggagacttctttaggggcattaacgccaatacgtacctggttacccttcacccctaaaactgtcacagtgacctcatctccaatcatgagggtctcaccaactcgacgagtcagaatcagcattctttgctccttgaaagattaaaagagtcgggtctctcgtatcccggcattatccatcatataacgccaaaaagtaagcgatgacaaacaccctacggtgtaagcagtcacggcatcacattctgttaaacctaagtttagccgatatacacaacttcaacccgactttatcgttatcagtgcttctcgcgcaagatgctgtaatccgagaatcacagcatctatgcaattatagttattacagttttgcgcttacccagcctttcacactggctaacgcagcagggagagcagacgcatcggtaccgccggcttgcgccatatccggacgaccgccccctttaccgcccacctgctgggcgagcataccaatcagttccccggctttaacgcggtctgtcacatccttagacacacctgcaatcagagaaaccttaccttctgcgaccgtggccaacacgacaatcgttgaacccagctgatttttcagatcgtcaaccatagtacgcagcattttcggctcaacgccggccagctcgctgaccagcagcttaacaccgttaatctcttccgctttgctggagagatttgcgctctcctgcacggcagcctgctctttcagctgctgcagctctttttccagctgacggctgcgttctaacgcggcgcggactttgtcaccgaggctgtgggtatcccctttcagcagctgtgcaatatcgcccagcagatcgctctgcgcgtgcagcatcgccatcgcgccttcgccggtcaccgcttcgatacggcgcacgccagcggcggtaccggattcagaggtaatgcggaacaggccgatatcaccggtgcgcgaggcgtgcgtaccgccgcacagctcggtggaaaaatcgcccatgctcagcacgcgaacgcgatcgtcatatttctcgccaaacagcgccatcgcgccggattcacgcgcagcgtcaatatccatgatattggtttcgatcggcaggttgcgacgaatttgcgcgttcaccagatcttctaccgcacggatctcctccggcttcatcgcttcaaaatgcgagaagtcgaagcgcaatgctttgtcgttgaccagagagcctttctgcgcaacgtgcgtaccgagaacctggcgcagcgccgcgtgcatcaggtgcgtcgcggagtggttcaggcggatacgctggcggcgagcctgatcgacatcggcctgcacggcgtcgccgactttaagcgaaccgctggtcagtttaccaatatggccaattgcctggccgtacttctgcgcgtcgctgacctggaaggagaaaccggcgcccttcagttcgcctttgtcacccacctggccgccggattcggcgtagaacggcgtctggtcgaggataacaaccgcttcctgaccggcgttcaccgcgtcaaccgctttaccatcgataaacagcgcggtgactttgccattcagttccaggctgtcatagcctttaaactcagaggcgccgtcgacgcggatcatcgcattgtagtccgcgccaaagccgctggattcgcgcgcgcgacggcgctgctcttccatcgcggcttcaaagccggcttcgtcaaccttgatgttgcgttcgcggcaaacgtccgcggtcaggtcaaccgggaagccgtaggtgtcgtacaggcggaaagcggtttcgccgtccagcgtgtcgccctgcagtttagccagctcttcatccagcagcgccagtccgcgctccagcgtacgggcaaactgctcttcttcggtcttcagcacctgctcaacctgagcctgctgctgtttcagctcttcgccagcggaacccatcacgtcaatcagcggggcaaccagtttccagaagaaggtctccttcgcgcccagcatgttgccatggcgaattgcgcgacgaatgatgcggcgcagcacgtagccgcggttttcattcgacgggataacgccatcggcaatcaggaatgcgcaggagcgaatgtggtcagcgataacgcgcagcgacttgttcgagagatcggtcgcgccggtaaccttcgccacgctcttaatcagatcgcggaacaggtcgatatcgtagttggagttgacgtgctgcagcacggcggcaatacgctcgaggcccataccggtatctacggacggcttcggcagcggctccatggttccgtcagcctgacggttgaactgcatgaagacgatattccagatctcaatatagcgatcgccgtcttcttccggcgttcccggagggccgccccagatatggtcgccatggtcgaagaagatttcggtgcatggaccgcacggcccggtgtcacccatctgccagaagttatcggaagcaaacggcgcgcctttgttgtcgccgatgcggataatacgctcgcgcggtacgccaacttcatttgcccagatatcgaacgcttcatcgtcggtttcgtagacggtcacccacagtttttctttcggcagggcgaaccagttttcaccggtcagcagctcccatgcgtatttgatggcatcctgcttgaagtaatcgccaaagctgaagttacccagcatttcaaagaaggtgtggtgacgcgcggtgtagccgacgttttccagatcgttgtgcttaccacccgcacgaacgcaacgctgcgcggtggtcgcgcgcgaataattacgtttgtcgagaccaaggaaaacatccttgaactggttcatcccggcgttggtaaacagcagggtcgggtcgttatgcggcaccagggagctgctcgcaactacctgatgtcctttactatggaaaaagtcgagaaacgcctgacggatctcagcggtgctcttgctcataattatcctgaaatcaagctaacgaaatgtcgctggcagccactacccagtatcgaccggcaggctactcacgaaaataaagtgggaataagataagttttcttcacggggaagtaaaatcccggatgggtcaatctgcaaaatttcgccagatttcctgaatatcctccatcagatagccgcggtagagcaaaaagcgctgaattttgactttttctgcaaatacgctgggcagggggtcgccatattttcgctgcgcctgctctttggcaagccgcgcccagtcgatttcgcactcgcgcatggctgcctctgtcgtctcgcgggagatccccttctgctttagctcctggcggacgcgcgccgggccgtaccccttgcggctgcggctggcaatgaactgacggacaaagcgttcgtcgtccagatagcggttctcaatgcaccattcaacgactttatcgacctcttccggcgtcacatctaacgcttcagggccgtttttgctcatgaccggtgcagccagttttcgccttagctcctgttcgctgtggtcgcgcattgccagaatgcgaatcgcgcgatccagcagcctggcgtagtcagagcggcgggatgaagtttcagtcacggtcagcctcgctaatcaaaaaaagcaaaagggccgcataagcggccccttgttagtctgttcagacgatatcagaaatcttgcccggtttccgcttcgctgttgccatcaaccgcgaagtctggcgtggagtcctgattgctcagcagcagttcacgaactttcttctcgatctcttttgccgcagccgggttctctttcagccaggagatggcgttcgctttaccctgaccgattttatcaccgttatagctgtaccatgcgccggctttctcaatcagcttctctttcacgccgagatcgaccagctcaccgaagaagttaatcccttcgccgtagaggatctggaattcagcctgtttaaacggcgcggcaattttgtttttcaccactttaacgcgggtttcgctgccgacaacgttgtcgccctctttcaccgcaccgatacgacggatatccagacgcacggaggcgtagaacttcagcgcgttaccgccggtggtggtttccgggttaccgaacatcacgccaattttcatacgaatctggttgatgaagatgagcagggtgttggactgcttcaggttgcccgccagtttacgcatcgcctggctcatcatacgcgccgcgaggcccatatgagagtcgccgatttcgccttcgatttccgctttcggcgtcagcgccgcaacggagtcaacgacgataacgtctaccgcaccggaacgcgccagcgcgtcacagatttccagagcctgttcgccggtatccggctgggagcacagcaggttgtcgatatcgacgcccagcttgcgtgcgtaaaccgggtccagcgcgtgttccgcatcgataaacgcacaggttttgccttcgcgctgcgcggcggcgataacctgcagcgtcagcgtggttttaccggaagattcaggcccgtagatctcgacgatacggcccatcggcaggccgcctgcgcccagggcgatatcaagggaaagcgagccggtggagatagtttccacatccatggaacggtcttcacccaggcgcatgatggagcctttaccgaattgtttttcgatctggcccagtgctgccgccaacgctttctgtttgttttcgtcgatagccattattactcctctcatgccgggtgtaaccgggtagtgaattctgttctgttgaagcaattatactgtatagtcatacagtatcaagtattttgtagaaattgttgccagaggagatttagcgcgtaggccgtggcctggcggcgtaccgactcgcggtctccggcaaagcattcgcgccgggttacgccctgtccgctggcgctggccacgccaaaccagacggttcccaccggcttttccgcgctgccaccgtccggcccggcgatgccgctgaccgaaatggcatagtccgcgcgagccgcacgcagcgcgccgatggccatctccaccaccaccggttcactcaccgcgccatggctaagcagcgtcgcttcgctgacgccaatcatctgcgatttcgcttcattgctgtaagtgacgaaaccgcgctcaaaccatgccgaactgccggcgatatcggtaagggttttggcgacccagccgccggtgcaggactccgccgtggtcaccgtcgcaccgcgcgctttcagcgccatccccacctgctcgctcagctgcattaattccgaatctgtcattcgtcgccccacttaagctgtacaaagaggccatcaaagatagcactttcaacggagatatggggacgaggtaacgaatttacgagtcggctggcgaaaaacatcggctatggccaacgccgcattttcggatagccgcccgggggcgccggtgtcacaattcaccgcacatataaggaagagttaaatgagaggttaccaggaatggccaaagcaacgcttacctcagagcagaacgtgaaaaaaattcgccaggtgcgcctgtacctgtttgtatgcggcacagtttcactgctaaccgcgctactgcatattttcacccgctcattcaacccgctgttcgaaggcgtacagatcctgctgggcgtgggctgtattgccagtggattcacattgaacaaaaaaatcaagcagatactcgcagaaccatagcggcggataaccggcccattgcgggccggtttttatttatttcatactcgccgcgatcagctccacgttgtgacgcagcattttcacgtagctgtccgccacgccgcccggttgagagagggcttcagggtagagctctcctcccggctgcgcgcccgtcgcgctggcaatctgtttaaccagtcttggatcaagctgattttccataaaccaggtatgcacctcgtcggctttaatttgtcgaattaatgccgccacctgcgccgcgctggcctcactttccgaagatagcccctgcggcgcgaggaaagtcacgccataggcgcggccaaaatagccgaaagcatcatggctggtcagaaccttacgctttgcctgtggaatggcggtgaactggcttttagcccagcgatcgatctcgttaagctggctgatatagcgcttgccggaggcctccaacgccaacttatcttccgggtcggctttcaccaggccgttgaggatattctgcgcgtacagcgcaccgttcgcggcgctgttccacgcatgcggatcggttaccgttgcgccatcttcttcaagcgtgtgggttttgactccgcgggaagccaccaccagctcgcctttgaacccggatgctttaatcagccggtccagccagccctccagccccaggccgttgaccaccaccacatcggcgttgttcagcagcgcgctgtctttcggcgagggctcgaaggtatgcggatcgccgtccggccccactagcgtatccacatgcacatgttcgccgccaatctgctgcaccatatcgcccaacacggaaaaactgctcaccacgtttagcgttttcgccatcaccccgtgcgatgccagacccagcgccagcgccagccatatcccggtacgtttcatcattgtccttaccccattaatttacgccagccgacaaccagccggctgcgcgagccaaaaaacaccgatacaaaaaagaggccgctggcggtcagcacaatggcgggtccggcaggcaaattcgccgcccacgacaggctcagccccatccacgcgcaaaaaccgcccatcagcgccgccagcagcagaatgcccggcagcgtccgcgcccagcagcgcgccgcgaccgcgggcagcatcatgacccccaccgccatcagcgtgccgagcacctgaaacccggccaccagattgagcaccagcagggcgaggaacaggccgtgcagcagcgcaggcactcttcgcgcattcacctgaagccagacgctgtcgaaggcttcgctgaccaggccgcgataaaacagggcgatgcaaatcagcgtcaggctggcaacgccggtcacaaacagcgccgaatcgcggtctaccgccagaatcgagccgaacagcagatgcagcaggtcgacgttagagccgcgcagcgagaccagcgtgacgcccagcgccagggagccgagataaaatccggcaaagctggcatcctcttttaaaagcgtgcgtcggctgacccaccccgccaccagcgccaccgcaatgccggcaataaaacccccgacggtcatcgccagcagcgacatcccgttaagcaggtagcccaccgccacgccgggcaaaatcgcatgcgagagcgcatcgcccatcaggctcatgcggcgtaaaagtaagaagacgccgagcatggtcgtgctcagggagagcgccaggcacaccaccagcgcgcggcgcataaagccaaactcgataaagggctgaatgaaggtgtgccagatcatgccagcctcgcggagtgaaaggcgggcagcacatcaggcgtactgccccagcgggcgcgctgcggcgtcagcagcatcgtttccgggaaatagtcggcgacccgctggttatcgtgcagcaccgccagaatcgtctgcccctgctgatgcatttccaggatcagcgccatcagctcacggcaggtggcttcgtcgatgccggtaaacggttcgtcgagcatcaccagcggcgcgcgctgcaccatcaccctcgcgaagagcatgcgctgaaactggccgccggagagcgcctcaatcggcgttttcgccatcgctagcagccccacccgcgctatggccgcgacgatacgctggcgcacctcccccccgagcccgcgcagcaacgatacctgcggccaggccccctggctgacgacatcctgcaccgtgagcggaaactgcgactccagcgcatgccgctgcgccagccagccgataaccggccgtccgtcgcgccagttcaggcggccgctgaccggcgggataaatccggccagcgtctttaacagcgtcgatttcccgcagccgttcaggccgacgatagccgtcatactccccgttgcaatcgtgccgctaagggacggcgcgatcgccagcccttcatagccagccaccagatgatcgagctctatcatggcagcgataccgcccaccaggttgccagccacagggcggccagcagcacgccggccatcgccagccgggcgatgcctgaagtcatcaataaggaagtcaatgtttacgcctcaataaaacgttataacataacaatattaaaagaagcgcggaatgtaaattggcgtcaacaaaaggaaatgctgcaaaatgttacagactcctctccggacggagaggagcacagaagacgggattactgcatccgggcctgagaaaccgccagaccgagctgccagacggccatcgcgtaatgggtgctgtggttatagcgggtaatagtgtagaagttcggcagaccgtaccagtactggtagcctgtgccgatatccagacgcagcaggctcgcctgctggtggttacccagcggctgagtcggggtaagtcccgccgccgccagctgcgagacgctgtatttggttttgaacccattgttcagcccaggcgcctggcccagcgcctgtaccgcaaccagatcgccgctcacccagccgtgctgcttgaagtagttcgctacgctgccgatcgcatcgaccggatcccacaggttgatatgcccgtcgccgttaaagtccaccgcgtactgcctgtaagaagagggcataaactgaccgtagcccatcgcgccggcgaaggagcctttcagatcgagcgggtcatcctgttcgctgcgcgccatcagcaggaacgtttccagctcgctggagaagtattctgcgcggcgcggatagttaaatgacagcgtcgccagcgcatcaaggatgcgggttttccccatcacccggccccagcgggtctcgacgccaataatcccgacgataatttccggcggcacgccgtaaacctggtacgcgcggttgagcgcatcctgatactggttccagaatgccacgccgttctgcacgttatccggggtaataaactgttttttgtagcgcagccaggcgccgtttggccctgacggcggcagcccggtgggcgcctggcggtccatcagacgcagcacatagtccaggcgtttggcctgcgagagaatttgatgcagctgctgtcggtcgaagccgtgcttgctcaccattttatcaatgaactgttccgccgccgggttattggcgaaatcgccgctcatctccatcacgttatgctgcggctcgagtaaaaaaccgcccgtgccgcccgccatttccttttccgcaggagtttgaggtttgctgctgcaggcagcgaggagaacgcacagggggagtaaagccagggaacgacgcttcaacatgggacatccatttaacaaatcggcaaggggtaattatggtaaagcatgcgcccgctcacaaggaagcggcggcaatgtaaattcttttttatcgccctttttcctctcgccccgccggatccttcgttcactccagccacaatctttcaaaataaaatatttatctttcattttgcgatcaatataacaatttcaaaccttttaaaatgattaaaattagctgccagttagcaagaaaaataacacgctgaaggagagaacaatgattgaagtcgttacccacggcgccgaatggtttatcggcctgtttcagaagggaggcgaggtgttcaccggtatggtcaccgggatcctgcctttgctgatcagtctgctggtgatcatgaacgcgctgatcaactttattggtcagcagcggatcgaaaagctggcgcagcgctgcgccggtaatccgatctcccgctacctgctgctgccctgcatcggcaccttcgttttctgtaacccgatgaccctgagccttgggcgctttatgcccgagaaatacaaaccgagctactacgcggcggcctcctacagctgccactcaatgaacggcctgtttccgcacatcaaccccggcgaactgttcgtctatctggggatcgccaacgggctaaccaccctcggtctgccgttagggccgctggcggtgagctatctgctggtgggcctggtgacgaacttcttccgcggctgggtgaccgacctgaccacgtcgatttttgagaaaaaaatggccatccagcttgagcagaaagtgcatctgtcaggagcgacatcatgacccgtattcgcattgaaaaaggcgccggcggctggggcggcccgctcgaactggacgccgttgccggtaaaaagattgtctatatcaccgcgggcacccgcccggcgatcgtcgataaaatcgcccgcctcaccggctggcaggcggtcgatggcttcaaagagggcgaaccgccggaagcggaaatcggcgtggcgattatcgactgcggcggcaccctgcgctgcggtatctacccgaagcgccgcatcccgaccattaatatccacgcgaccggcaaatcgggtccgctggcgcagtacatcgtcgaagacatttacgtttccggcgtcaaagaagagaacattttcgcgctggaagagggtccctccccggccccgcaggccgcgcctgcccagccggcggcccgcgactatgacaccagcaagaaaataaccgagcagagcgacggcctgctggccaaagttggtatggggatgggctcggtcgtggcggtgctgttccaggccgggcgcgacaccatcgatacggtgctgaaaaccattctgccgtttatggccttcgtcgcggcgctgatcggcatcatcatggcctccggcatcggcgactggattgcccacggcctggcgccgctcgccagccatccgctgggcctcgtcaccctggcgctgatctgctctttcccgctgctgtcgccgtttctcggccccggcgcggtcatcgcccaggttatcggcgtgctgattggcgtgcagattggccttggcaatattccgccgcatctcgccctgcccgcgctgttcgccattaacgcccaggccgcctgcgactttatcccggttggcctgtcgctggcggaagcgcgccaggacaccgtgcgcgtcggcgtaccgtcggtactggtgagccgcttcctgaccggcgcgccaacggtgctgatcgcctggttcgtttccggatttatttaccaataagaggtgcctgaagatgaccgtgatttaccagaccaccattacgcatatcggcgccagcgcggcgatggcgctggacgagcagatgctgatcaccttccgcgaaggcgccccggccgatatcgaagagtactgctttattcacaaccacggcgagctctccggcgcgctggtgccgggcgctgagctgcagctcggcgagctgcgctacccggtcaccgccgtcggcgacgtcgccgagcagaacctgcgcgagctgggccatatcacgctgcgctttgacggccaccgcgaagcggaattccccggaaccgtacacgtggcggggccggtgccggaaggcatcgccgccggctgcgtactgaaatttgttgcttaagttgtaaggagaaaattatgaatcaggttgctgttgtcatcggtgggggacaaaccttaggggagtttctgtgtcgcgggcttgccgcagaaggctatcgcgtggcggtggtcgatattcagagcgataaagcgacccgcgtcgcgcaggccatcaatgcagaacatggcgaaggcacggcgtggggcttcggcgcggacgccaccagcgaagccagcgtggtcgccctcgcccgcggggtagacgaaatattttcccgcgtcgacctgctggtctatagcgccgggatcgctaaagcggcgtttatcagcgacttcgcgctgggggatttcgaccgttcgctgcaggtgaatctggtgggctacttcctctgcgcccgcgagttttcccgcctgatgatccgcgacggcattaaaggacgcatcattcagatcaactctaaatccggcaaagtgggcagcaagcataactccggctatagcgcggcgaagtttggcggcgtggggctgacgcagtcgctggcgctggacctcgcggagtacgggattaccgtgcactccctgatgctcggcaacctgctgaagtcgccgatgttccagtctctgctgccgcagtacgccaccaagctggggatcccggaggagcaggtcgagcagtattacatcgacaaagtcccgctgaagcgcggctgcgattaccaggacgtacttaacgtgctgatgttttacgccagtccgcaggcttcatactgcaccgggcagtccatcaacgtcaccggcgggcaggtgatgttttaaaccagaggtcccggattgcgctgcgcttatccgggctacaaaaccggcaccccgcgccgatccgtagcccgggtaaggcgcaactcgtcgccctccggggaaatatcgcacacaccttaaggagacttttatggttaccgcacttatcaccgtcgccgccatcgcctggataacccagctcgcctttggcggctggcaaatcaggcagttcaatcgcgcattcgatcggctgtgccagcagggacgcgtcggcgtcggccgctcctcggggcggttcaagccgcgcgccgtcgtcgccatcgccgtcgacgaaaacgaccgcattcgcgatacgctgttaatgaaaggcctcaccgtcttcgccaggccgcaaaaaattcccgccctcaccggtaagcatcttaaggaattgcagcctgatgtgatctttcccaatgatccgctctgtcagaatgcactatcattagcgcttaatccgaaacatggataatttcgttgtgaacgttaatatcttgcgaaattatcatttcgaaactttaaacgcaggatacaacgcctatgaaaccacgtcagcgccaggcagccattctcgagcacctgcaatcgcagggcaaatgctcggtcgaagagctggcgcaacacttcgacaccaccggcaccaccatccgtaaggatctggtgatccttgagaatgccggtaccgttatccgcacttacggcggcgtggtgttaaataaagacgaggccgatccgcccatcgaccacaaaacgctgatcaacacccataaaaaagagcggattgccgaagccgcggtcagcttcattcacgatggcgactcgatcattcttgacgccggcagcacggtgctgcaaatggtgccgatgctcagccgcttcaataacattaccgtgatgaccaacagcctgcatatcgtcaacgccctctccgaactggataacgaacaaaccattctgatgccgggcggcacgttccgcaaaaaatcggcctcctttcacggccagctggcggaaaacgccttcgaacacttcagcttcgatcgactgtttatgggcaccgacggcattgatttaatcgccggcgtcaccacctttaatgaggtttatacggtcagcaaagcgatgtgcaatgccgcccgcgaagttatcctgatggccgactcgtcgaagtttggccgcaaaagtcccaatatcgtctgcggcctggagagcgtagacaaactgattaccgatgccgatatcagcccggaatttaagcgggcgctggaagacaaaggcatcgaagtcattattactggagaacatcatgagtaactttctgttagaagccggacgccagaccctgatgctggagcttcaggaggcgagccgcctgcctgaacgcctgggcgacgacttcatccgcgcggcggaaaccattatccactgcgagggcaaactggtcgtctccggtatcggtaaatcgggtcatattggtaaaaagctggccgccaccttcgccagcaccggcaccccggcattttttgttcacccggcggaagcgctgcacggcgacctcggcatgctcgacagccgcgacgtgatgctgtttatctcctactccggcagcgctaaagagctggatcttatcgttccgcgcctggaggaaaaatctattccgctgctggcgatgaccggtaaatccacttcaccgctggcgctggcggccaaagcggtgcttgatattgccgtagagcgtgaagcctgcccgatgcacctcgcgcccacctccagcaccgtcaataccctgatgctcggcgacgcgctggccatggcggtcatgcaggcccgcggctttaacgaagaagatttcgcccgttcgcacccggccggcgcgctgggcgcgcggctgctgaacaaagttcaccatctgatgcgccgcgacggcgacgtgccgcgcgtcgccaacgacaccagcgtcatggacgcgatgctcgaactcagccgcaccggcctggggctggtggcggtctgcgatgagcgcaaccacgtgcagggcgtctttaccgacggcgacctgcgccgctggctggtgggcggcggcagcttacaggatatcgtcagccaggcgatgacccgcaacggcgtcactctgcaagcggaaagccgcgcgatagaagccaaagagcgcctgatgaagcataaaatcagcgccgctccggtggtggatgaaagcggccagctggtcggcgcgattaacctgcagaacttttatcaggccgggatcctttaagccccagacgcttcgccagccggtgcaggttggcgacgtcgagccccagcgcgcgggcggcggcggcccagctgcggccattagcagccagcgcgctggcgatcgcttcgcgctggaacgcctccgtcgcctcgcgcaggctcaccgcttccgccgccggctgcgggctgacggtcggcaaggccggcgcttccccggccagctgaaaatgctgcggctccagcacgatatcattacccgcctgcgtcgcccgcgccagcaccaccgcccgatgaatcgcgtgctccagttcgcgtacgttgcccggccatgaccaggcgagcagcctggcccgagtcgcttcgcttaaaatcacctgcgccagccccatgcgcaaacggcactgttcgcaaaaatagccggccagcagcaccacatcactttcccgctcgcgcagcgccggaaccgacagaggaaacacgctcaggcgatgatacaggtcggcgcgaaagcgcccctccaccacctcctgacgcaggtcgcggttggtggccgccagcacccgcacatcaacccgcaggctgcgatcgtcgccgacgcgctgaatatcgccatactgcagcacccgcagcagcttggcctggagcgccagcgaaagctcgccaatttcatcgaggaacagcgtcccgttgtccgccatttcaaatttaccgctgcggttgctgatcgccccggtaaacgcccctttgacgtggccaaacagctcgctctccgccacgctctccggcagggccgcgcagttgagatagaccagcggattggccgcccgcggcgacccctgatgcaccgctttcgccaccagctctttgccggtgccggtctcgccgctaatcagcacgtttaagtcagaagccgcgacgatatcgatctcttttttcagctgcagcatcggcgccgacaggccaatcatctcctgacgttcggctgccggatacacgatagcctgctccggcagcacgttttgattctccagccgggcgatcagcagcgcgttattgagcgccccggccaccagggcggcaatcaggcgcagctcctcgtcgctgaagctgtcaaaacggtccgcatccataccgtcgagggtgagcgcgccgatcagggtttgcccggcaaacagcggcaggccgacgcaggcgtgcaccttcaggctctcctgcccggggatcaggccatcgtaagggtccggcagatcgctatccgccgggaagcgcaccacgtcccccgcccgggcaatcgcctccagccgcgggtggccttcaagggcaaagcgtcggccaagcacgtcctgggccaggccatcaatcgccagcggcacaaactggtgcgcctcgtagcgcagcagcgccgaagcatcgcagccgagtatctgccgcagggtggtaatcaaacgcgaaaaacggtcggcatggccgagatcgctttgtaaatcaatggcgattttcgccagggcctcgacggagaaactcattgtcgcctcatagtcattttgacaccaaacgtagtcatatcgactattttaactattgtcattttgacatcaacagatttaataaaaaacataaaacacttaaaattcaattaattaaaaagttggcacgcaacttgatataagcaaaacatcttatttgaacactgctgaattaattgaggttgctatgtctattctggttaaaaataacattcattgggttggccaacgcgactgggaagtgcgtgatttccacgggactgaatacaaaacgctgcgcggcagcagctacaacagctatctcatccgggaagaaaaaaatgtgctgatcgataccgtcgatcataaattcagccgtgaattcgtgcagaacctgcgcggtgaaatcgacctcgccgatattgattacatcattatcaaccatgctgaggaagaccatgccggcgcgctgaccgagctgatgacccagatcccggacacgccgatttactgtaccgccaacgccatcgactccatcaccggacaccatcatcacccggagtggaattttaaggtggtgaaaaccggcgacagcctggatatcggcaacggcaagcagctgatttttgtcgaaaccccgatgctgcactggccggatagcatgatgacctatatgaccggcgacgcggtgctgttcagcaacgacgccttcggccagcactactgcgatgaacatctgtttaatgatgaagttgaccaggttgagctttatgagcagtgccagcgctactatgccaatattctgaccccgttcagccgcctggtgacgccgaaaattaccgaaatcctcggctttaacctgccggtggatatgattgccacctcccacggcgtggtctggcgcgataacccgacgcagatcgtcgaaaaatatcttgagtgggcggcggattatcaggaagaccgcatcacgattttctacgacaccatgtccaacaacacccgcatgatggccgacgcgatagcccagggcattaccgacgtggatccgcgcgtggcggtgaaaattttcaacgtcgcccgcagcgataaaaatgaaatcctgaccaacgtgttccgctcgaagggcgtgctggtcggcacctcaaccatgaataacgtgatgatgccgaaaatcgccgggctggtggaggagatgaccggcctgcgtttccgtaacaagcgcgccagcgccttcggctcccacggctggagcggcggcgcggttgaccgcctgtccacgcgtttacaggatgcgggctttgaaatgtccctgagcctgaaggccaaatggcgcccggatctcgacgcgctggaagtgtgccgcgagcacggccgagaaatcgcccgccagtgggccctctccccgctgccggcgagccatgccaagcacgccgcgcctgaggcaacgccctgcgcagcgccagcggcagccgatctcggcccgaaaatgcagtgtagcgtttgccagtggatttacgaccccgaacagggcgaaccgaaccaggacgtccagccgggtacgccgtggagcgaagtcccggataacttcctctgccctgagtgttcgctgggtaaagatgtgtttgacgttctggcatcggaggcaaaatgagtgatggcatcgtcatcatcggctcgggcttcgcggcccgtcagctggtgaaaaatattcgcaagcaggacccgaatatcccgctgaccctgatcgccgccgacagcatggatgagtacaacaaaccggatctcagccatgtggtcagccgcgggcagaacgccgacgacctgaccctgcaaacggcgggcgagtttgccgagcagtacaatctgcgcctgtttccgcatacctgggtcagcgatatcgacgccgagcagcacctggtgaagagccaggaccgcgagtggcgctatgacaaactggtgcttgccaccggcgcgacgccgtttatcccaccggtgccgggccgcgagctgatgctgaccctgaacagccagcgggaatacggtgcggcgcaaagccagctgcgcgatgcaaaaagggtgctgatcgtcggcggcgggctgattggctgcgagctggcgatggatttctgccgcgccggcaaagcggtgacggtggtggataactccgccagcgtactgtcggccctgatgccgcccgaggccagcagccgactgcagcatcgtctgaccgacatgggcgtggatctgatgctgaagtcccagctggaaagcctgacgcagagcgccgacgggattcgcgtcacccttgaccgccagcgtacgatgacggtggatgcggtggtggccgccgccggtttacgcccggaaacggcgctggcgcggcatgcggggttgaaaactcaccgcggcgtggtggtgaacagccagctgcaaaccagccatccggcgatttacgccctcggcgactgcgcggaaatcaacggcatggtcctgccttttctgcagccgattctgctaagcgccatgtgcctgagtaaaaatctgctggcccagcagggagaactgaagctgccgccgatgctggtgaaggtcaaaacgccggatttaccgctgcacctggcgggcgatacccggcgcgaggatctgacgtggaatatcgttgccgccaaagacggcctggtcgcgaaaggcgttgacgccgagaaccagctgcgcgcttttgtggtcagcgaggatcgcatgaaagatgcttttgctctgctcaagcagctggtgagttaacctcgatgaaatgaggttattcccgggtcgcggcgtaaacgccttacccgggctaccggatctcagacggcagtagcccgggcaggcgccttgcgccgcccccgggagcagcgcgcagagtggcataatttcccggaggcgatgcttgcgcatctgtccaggctaccggccagcagacggccattaacctgtagcccggctaagcgcagcgcgagccggggaaatgcccaacctaccgcgccagattatcgtacccgcgccagcggtagttgagcaccgacagcacccagcaggccacgaacagcccgaccaccacaaaaccggcgtcgccgagatggtcgttcaatgcgccaacccagcgccagaggccgccgctcagagagaacttatccatcaacagccccagcgcttccagaccgccgataaacagcgccaccaccaccgaggtaccggtaatggtcatattgtaatagagcttgcgctgcggcttgctgaacgcccagccgtaggcgccgaccatcagcacgttatcgagcgtatccaccagcgccatcccgctggcgaacagcgccggaaaaaccataatcgaccaaatcgacaccccgctcgacgcgctggcggcggagatccccagcacgccgatttccgtcgccgtatcaaagccgaggccaaacagaaagcccaccagatacatctgccagctgcggctaatcaggcggaaggttttaccgaacaaccagctcatcatgccgccgccggtcatgacctcatcgcttaccttttcgccctgcttccacgcccgaaagctgcgccagacgctgcgcaaaatgaccaggttgataaaggccatcaccagcagaaacagcgccgacacggcggtgccgataacgctgccggtctcgtgaaaccagctcatctgctggccaaacgcggtggcggtcgcggcaatcgccgccgaagccagcaccacaatcgacgaatgccccagcgagaaccacgcgccaacggcaaaaggccgcttcccctgctgcatcattttgcgggtcacgttgtcgatggccgcgatatggtcggcgtccaccgcgtggcgcagaccataaccccaggccagcaggctggcggccatcagcgcgccgctgccgccgaacgccgtaaacgcccagccccaggtcagcaaattggcggcaatcaatgccagcaccagcgccgctgcgcgcggctgctgacgcaaaatcgtcactatcatatcggtgtcctttaagcctgcaggcgggccgcagcgataaccgcctggccgagggcaatcgcgccatcgcctgcgggcagctgctgcggaaagagcagagtaaaatcggccagataaaaggtcaatcgcgccgtcagcaggcggttgtgcagtaccccgccgccgaaggccagcgtgtgaatattccgcgcgttcgcgcaatcgcgcatcatcgccgccagcccgcgggccagcgcatcatgaaaggcccacgctttttgcgccgggctcgcctgccagctcagccactgctgccagaacgtcgccagatccagttttccatcgcgccacggcagggtcaccggatgatcaactccttcgcaggtcgccgccagcgcctccagacggcacgccgcttccccctcatagctcagagttagcggcgcgcactccagcgcgcaggcgacggcgtcaaacagacggccgcacgacgatgcctgcggcgcattaataccgcgctcgattgcccgcgccagcagcggccagctttgctggcgcagcgcggcggtgtcggcataattctgccactcggggacgaaggccaggcagtgggcgagcagattgcgccacggctgacgcgccgcgaggtcgccgccgggcagcgccaccgccggcagaccgccgagatgctcgcactcgcgatagttgacccgcaggcactcgccgccccacagcgcgccgttttcccccatcccgataccgtcgaggatcagggcaatcacgtcgccgccctcccgcggccagcggtgctcggccaggcaggcggcggcgtgggcatgatgatgcaacacgcggtccaccggcagcataagcgacgccgcccaccgcgaagcgcggtagccgggatgggcgtcggcaaccacccgctgcggggtaaaagcgtaaatctcctgcatcagacgcagcgcctgccgccactgcgcctcgacgccctcctcatcgagatcgccaaaatgctggctgagcaccgcttcatcgccgcgcagcaggcagaacgtatttttcatatccgcgccgagagccagcagcggcggtacgtcgtggaaacccggcggcagcgccagcgcgtccggcacgtagccgcgggcacggcgcagcatctcgccgctttgccgcaccacggaatcatccatccgctgcacaatctcgcgattatgcagcagaaatccgtcggcaattccggctaaatccgccagcgcctcggcgttggttaacgccggcgggcgaccgctaaggttgccggaggtcatcactaatgggcgcgccagcgcctgcgaaagtaaatgctgcagtggattagacggcagcatcccccctacttccgcaagccctggcgcaatctggtcgcacaggccggccacctgcgttttctccagcagcacgatcggcgcggcgggagaggtcagcagcgtcagcgccggttcatcgagccccgccgttgtcgccagcatcaccgccagcggtttcgccgggcgatgcttacgcgcccgcagcttcgccacggcctcgcggtttccggcgtcgcacagcagatggaaaccgcccagccccttcaccgccacaatatcgcccgccagcaggcgagcaatcgtcgcatctaaggcggcctcgccaaataaatgctcctgcgggccgcgccactccagctgcgggccgcactcggcgcaggctaccggctgcgcgtgaaagcggcgatcggcgggatcgccatattccgtcgcgcaggcggggcaaagaggaaacggcgacatagaggtcagcgggcggtcgtatggcatagcgcgaataatggtaaagcgcggcccgcagtgggtgcagttgataaacggatagcggtagcggcgctcccgcgggttgttcatctccgccaggcatgccgggcaggtagcggcatcgggcacaatctgcgtgcgcatgcttccggccccgctttggcggatggtaaagcccggcggcggcgcggcccagacaaaaggcgccgctgccgcgctgtcgatacgcgccagcggcgggcagcgccgggttaacgcggcgagaaatggcgcatcatcgccgacaaggcgcaccagcacgccgtcgccgtcgttgcacacgtcgccgcgcagctccagctgctgcgccagctgccagacgaaggggcggaatcccaccccctgcactttaccgcgaatgcggatttgcaccccgttcattgcgcgaccggcttaccaggccagcgcggtgcggcggcgtttttcgatattcatctgttcgagcttgttgcggtcgacgcaaatcagcgcgtgggtcggacaggcatccatacaggccgggccttcctcacggtggtggcaaaggtcgcatttgttggcttcggctttttccgccatcacgttcagccccgcgccgctgtggcggataaccgggcgcaccaccacttccatggcgccgtagggacaggccaccacgcaggttttgcagccgatgcagcgctcctgcatcacgtggacgaagccccgatcgcggctgatcgcgccgttcggacagacgttggcgcacggggcgtcctcgcactgacggcaggcggtggccgtcgacacgttgacgcctttgatcacgtgaatacgcggtaaaaagctttttggcgtcagcgcggcgcagtcctgattttcctgatgagagaccacgcaggccacttcacaggtgcggcagccgatgcatttgctcgcgtcggcgataatgaaacggttcatccatttctccagctgtaagaaggttacgcgccggagtatgcataatgcgttccaacttttatattactgatattaaagaagataaatacgggagatactgtcatcgtcagttgtgacgatgacagctgacgacgtcaggcgtgcgggccgggaaccatcgagtcgcgttcaatcagctcgccggggaagatttgctgaaatttaaaatcgccgccgtcgagcataaagatcagccggttgatgctctctttgatcatctccgtcaccgggactttgacgctggagagcgccggcaccataaacggcgccagcgcgatatcgtcaaagcccaccaccgaaacctgctccgggaccttgacgccgagctggtgcagctgcttcatcgcgccaaccgccatatcgtcgttgctcgccaccagtgcgctgtagccgacgcggcgctggcgcagcgtctcgactcccgccgcgccggtttccggcgtccagcggccttcgacgaccagatcgttattcagggcaatgccgccgcgggccagcgcgtctttatagcccgagaggcgctctacgccggttggcgaatccagcgaaccggtaataaacgcgatttcccgatggcccagcgcgataagcttttccaccgccatcatcgccgaggccttttgatcggaccagacgcagtggctggcgttgcggcgcaggcggcggttgagcaccatgatcggccgctcatgattttcgataatctcatccatctcatcaacgctgagaaagcgcggatagataataatcgcatcgcagcgcagatcgagcagatactgaatcgcctcgcgctcctcctcggcgctgtgcttgccgtcggcgaggatcagctgccgccctttgtcttcggtcatccgcgccacgtggtaaagcagttcgctgaaatagacgccgtgataaagggtgttggtcaccaccagcccgagggtctgggtctttttcgtcgccaggttgcgcgccagcagattcggccggtaaccgctttcggccaccgcctggaagacgcgatctttggtctcctggctgacatagccgttccccgacagcacccgcgaaacggtggcctttgacacccccgcgcgcttcgctacctccagcatcgttgccatgtggttattcctgttgccaatgttgcccgcagtgtactgcacgcgcagcgctttttcagcatttgcgcgtcgcccgcgctgatgcgcacacagcgatcaaaatcacaaaatcgagatcttatttttttatttcttgtatgcattcatgaaactaatcattattttgtggaaccggtttcctatgtatgcatgatgccgctccgctttccggcgcggcgacaagccagtaccccattgataaacaggataaaatccgatgtctaaaaattatgcagctctggcgcagcagattatcgcggcaattggcggcgcagataacgttgccgccgtcacccactgcatgacccgcctgcgtttcgtggtcaaagacaacgagcgggtcgacagcgccaccctcaaagggctgaaaggcgtgctcggcgtcgtgcgtagcgataaccagtgccaggtgatcgtgggcaataccgtctcccaggcgtatcgcgaagtggtcgcgctgctgccgggggatctacgccccgctgaaccgcaggggaaaccacccattaccctgaaacgcatcggcgccgggatcctcgacgcgctgatcggcaccatgtcgccgctgatcccggcgattatcggcggatcgatggttaagctgctggcaatgatcctcgagatgaccggcgcgctgcccaaaggcgcgtcaacgctgactattctgacggttatcggcgacggcgcgttcttcttcctgccgctgatggtcgcggcctccgcggcggtgaagttcaaaaccaatatgtcgctggcgattgcgattgccggggtgctggtacacccgagctttatcgagctgatggccaaagccgcccagggcgagcacgtggagttcgcctttattccggtgacggcggtgaaatacacctataccgtgatcccggcgctggtgatgacctggtgcctctcctatatcgaacgctgggtcgaccgtatcaccccggcggtgacaaaaaacttccttaaaccgatgctgatcgtgctgatcgccgctccgctgtcgattctgctgattggcccgctcggcatctggatcggtagcgccatttccgcgctggtctatacgatccacagctatctcggctggctgtcggtggcgattatgggggccctgtggccgctgctggtgatgaccgggatgcaccgggtctttaccccgactatcattcagaccatcgccgaaaccggcaaagagggcatggtaatgccgtcggaaatcggcgctaatctgtcgctgggcggttcgtcgctggcggtggcgtggaaaaccaaaaacccggagctgcgccagacggcgctggcggccgcggcttccgcgattctggcggggatttccgaaccggcgctgtacggcgtggcggtgcggctgaagcgaccgctgatcgccagcctgattagcggctttatctgcggcgcggtggccggcattgccgggctcgccagccactcgatggcggcgccggggttgtttaccagcgtccagtttttcgacccggccaatccgatgaccatcgtctgggtcttcggcgtcatggcgctggcggtagtgctgtcgtttgtcctgacgctaatgcttggctttgaagatattccgcaagaagaagccgccgccgacgccagacagcgccaggccggcacccaggcttctcacgcctgaacaccattttgttaacgaggtaacgcatggcgacttttccacagggatttttatggggcggcgcactggccgccaaccagtccgaaggggcatatctggagggcggcaaagggctgaccaccgtcgatatgattccccacggcgcgcaccgcctggcggtcaagctggggcaggagaaacgcttcgcgctgcgcgacgatgagttctacccgagccacgaggcgatcgatttttatcatcgttataaagaagatatcgccctgatggcggagatgggctttagcgtcttccgcacctctatcgcctggagccgtctgtttcctgagggcgatgagctggaaccgaacccggaagggatcgccttttatcgctcgctgttcgaggagtgcaaaaagcaccgcatcgagccgctggtgacgctgtgccatttcgacgtgccgatgcacctggtcaacgagtacggctcctggcgcaatcgaaaaatggtggagttcttcacccgctacgcccgcacctgctttgaagcctttgatggcttggtgaaatactggcttaccttcaatgaaatcaacatcatgctgcacagcccgttctccggcgccggtctggtgtttgaagagggggaaaatcaggagcaggtgaaataccaggccgcccatcacgaactggtcgccagcgccttagcgaccaaaatcgcccacgaggtgaatccgcaaaatcaggtcggctgtatgctggcgggcggcaacttctacccttactcctgtaagccggaagacgtgtggatggcgctggagaaagatcgcgagaacctgttctttatcgatgtccaggcgcgcggcgcgtatccggtctgggcggcgcgggtatttcgcgagaaaggcgtgactatcgccaaagaagcgggcgatgatgaaatcctgcgccataccgtcgatttcgtctccttcagctactacgcttcacgctgcgcgtcggcggagatgaacgccggcaacaccagcgccgccaatatcgttaaatcgctgaagaacccgcatattcaggccagcgaatggggctggggcatcgacccgctcggcctgcgcatcaccatgaatatgatgtatgaccgctaccagaaaccgctgttcctcgtggaaaacggtctcggcgcgcgggatgagattgacgctaacggcgagattaatgacgactaccgcatcagctatctgcgcgagcatattaaagcgatgggtgacgccatcgaggacggcattccggtgatgggctataccagctggggctgtatcgatctggtgtccgcctctaccggcgagatgagcaagcgctacggctttatctacgtcgaccgcgacgatgccggacacggcacgctggcgcgaaaacgcaaaaagtcgttctggtggtataagaaggtgattgccagcaacggggaagatttagcgtagtgcgccccgcagacggagggtgcctcagcttagcaaacacctgcaacacggaaattttccccggcttgcgctacgcttagccgggctacaggttcatcaacgctcgcggaccggtagcccgggtaaggcgtttacgccgcgacccgggaaaaaagtccacttgctccccctgacctaacttccggctacaggttcatcaacgctcgcggaccggtagcccgggtaaggcgtttacgccgcgacccgggaaaaagtccacttgctccccctgacctaacttccggctacaggttcatcaacgcccgcggaccggtagcccgggtaaggcgtttacgccgcgacccgggaaaaaagtacgcttgctcccccaggccgaactccaggctcgcgctgcgcttagccggggaacgccggctcctctgcggcttcaagtgccgcaaaaccgccattcccctgccagccatcaagccgcgcgtacaccacctcgaccgcgtccttaatcggctgggtcattggataataaaagccgacgatatccggctgaatgcctaagaaaatcacctcgccgatatcctcttttagctgatcgatcagatagttgagcggcatattgtgggtggtcatcataaacatctcggcgatatcgtccggatcgacgatgcggatctcgccggggttcaggcccatatcggtggcatcgactatcagcaggcgctcggggcgcagctcgcgaatggcgacgatatcgttttccggcgcgctgccgccgtcaatcaccacccattcgccgacgggattagccgcgcacatctccgccagcagcggacctgcgccgtcgtcgcccatcatactattgccgacacagagtaaaacgtcagtcacggagtctcctcaccatcaggtagatggcgctttcctggtgaatatcatgcagcatgctgagcagcgttttgctccacgcctgctgctcgggggtctgacgggcctgcgctttatcaaaagcgttggccagcatcgtcacatgattgctgtcaataacaatctcgccgtacttcggcacgccttccatttttcgccgcgcggtgctgccctcttcgagggtcgcaatccacgccagatacgcctgccacgggcagctcagcgccgcctcaaggcagtcgatgacgccgaggtggtggccaatcgccaggctgtaatagaccacctgctgcgcctggtcgggcgtcgcatcgttctcatcaataaatttacggctcagctgactgaacaccaccgtctcgctcatcggatacgcgctccctcgaccacctggttcagatgggtgacgatctcggtcaggcgcggatctttttccgcctccagccagcgcaccacctggctatcgccctgccccagcaggcgcatatagtcgtcggctatctggcgaccgtagcgatagcccgccagccggcgcgcttcgcggtcgatgcgcacccgcagcggctgtaccatatccgggtgcagaagctcggtcggccgttcgtcctgttcgcccggcacgcgggcgtggattttctgttccagcaggcccagcgccatcgcgaagccgtacagcgtcgcggcgggggtcggcgggcagccgggaatatagacatccaccggcacgattttatcggtgccgccccatacgcagtagaggtcgtggaagatgccgccgctgttgccgcaggcaccgtaggagatacagattttcgggtccggcgcggactgccacgcgcgcagcgcgggagaacgcatcgcccgggttaccgccccggtaaacagcagaatatcggcgtgacgcggcgacggcaccactttgatcccaaaacgctcggcgtcgaacagcggcgaaagggtagcgaaaatctcgatctcgcagccgttgcagccgccgcagtccacccggtagacgtaggcggaacgcttaattttcttcagcagcgatgccttcatgctggcgatggactcatccaccgtcatcggcaccggaatgccgttttcatcgcgcgggcctaataagttgctcatcagctggcctctctcatatggcgagtcagttcaatacggtcggacggcaccaggcacttctggcgtttacactccgggcaggtctcaaagctttcgcgatgcagctcggcgcggctgtcgccgttgtgtttgagcagcgcgatggcgtagtcgatctctttctgtacggcgaacggccgttcgcatacccgacagtggcagatggcaaaacgcgactgctggaggaaatcctcttttttccacaccgccagctcgtactcctgagagagcctaatcgccgccgtcgggcaaacctcttcgcagcgtccgcagaaaatgcagcgtccgaggttgaactgccacgccagctggttggtggccagatcggtctccaccgtcagggcgtttgacggacaggcgttaacgcaggcggcgcagccgatgcactgctgcgggttatgctccggtttgccgcggaagtttttatccaccggcatcggctccagcgggtatgagtgcgtcgcggtgccggttttgatgacttttttaataaaggtaaacatggcgattccttatttcagcggcgagttcttacgctcgatgctgtagcgctccagctctttgtacggcaccactttgcttttcttcttgcgcacgtcgactacggtcatgcggtcggtgcaggagtagcacgggtcgaggctgccgataatcagcggcgcgtcggagacggtattgccgcgcagcatatagcgcagggtcggccagttggcgtaggtcgccgcccggcagcgccagcggtacagcttctggttgtcgccggtcatgctccagtggatatcatctccgcgcggcgcttccgagaagcccagcgcgaagcggtgcggaatataggtgaacccttcgaccatcagcgggccgcccggcaggttatcgaggccgaagtcgatcatgttcagcgcggtgtagacctcgttgatgcgcaccttcaggcgcgagatgacgtcgcagccctgctcgctgtgcacttccatcggcagcaggccgtagccgacaaacgggtgatcggcgcgggtatcgcgggcgtggccgctggcgcgcaccatcgggccaacgttgctgaagtcgcgggcgatttgcgggtcgagacggccaatacccacggtacgctgctccatattcggcgtgctgagcagcatatctaccagctcctgcacgtcgcggcgcatctgctgcgccagctggcgggtctggatcatgtcctctttcagcagatcgcgacgaatgccgccaatcaggttcagaccgtaggttttacgcgccccggtaagaatttccgccatcttcatcgaggtttcgcgcacgcggaagaactgcataaacccggagtcgaagccggtaaagtggcaggcgaggccgaggttcagcaggtgcgagtgcaggcgctccacctccagcagaatggcgcggatcatctgcgcgcgctccggcaccacgatgcccatcgcgttctccaccgaagtggtgtaggcggtgctgtgggcgaaaccgcagataccgcacacgcggtccgacaggaaggtgacttcgttgtagcccatgcgggtttccgccagcttttccatcccgcgatggacgtagaacaggcggtagtcggcgtcgataatattctcgccgtcaacgaacaggcggaagtggcccggttcgtcggaggtgacgtgcagcgggccaatcggcaccacgttgttttcttgctgcccagctcgttgataaactcgtaggtttcggcgtcggtggtcggcgccggacgctggcggtagtccatgctgtctttacgcagcggatagagttcatccggccagtcgtccggcagcaccagccggcgctcgtccggcagccccaccggcaccaggccgtacatgtcgcgcacttcgcgctcgccccataccgccgccggcacccgcggcgtcaccgacggatactcgggtttattggcatccacttccacgcgcacggtgatccagcacttcgtgccctgctccatcgacagcacgtagtagacggcgtagtggccgttcagcttgcgttcatcgttgccgaacagcaccgacagccagccgccctgcttgtagtacagaaactcgaccacttccggcagatagttgaccttcaccgtgaccgtcaactggtctttggtctgccaggcttcatccagcaccacgcccggaaaggcctgatgcagcgcggcgagatagtgttgaccgattttttcttcagacatgctcaaactctcttaaatcacgccaccagcaaggagacgaaggctaaaaaggcaaaaccaaacccggcccaggtgacgcgggaggtggcgcaaaagcgcagacgcgccatgctgttttcgaacagcgcaatcaccagcacgccgagcaccagcttgacgacggcaaccaccagcgccagcagcagaccgccgacgctaaagctggtcatctgtccccacgggataaatacgccgacgaacatctgcaggaccaccagctgcttgaggctgatgccccacttcagcacgccgaagccgctgccgctgtattccgagagcgggccttcctgaagctcctgctccgcttccgccaggtcgaacggcagcttgcccatttcgataaaggtggcgaaggcgcaggcgcacagcgccagaatcagcggaagagtgcgggcgacaggccagtgataaatggtgtcggtgatgctgctgatatgggtggaccccgcgacctgcgccgcgacccacaggccgagcagcaggatgggctccaccagcacgccgagcatcgcttcgcggctggccccaatagcggtaaacgggctgccggtatcaaggccggaaatagcaaagaagaagcgggcgatagcgaacaggtagatcagggtgatcaggtcgcccagccccgccatcggcgaatcaacggtcaccaccggcagcgcggtggcgatggttagcatcacgccgaccatcacgtacggcgtcaggcggaagacccagccggaggcatccgggccaacgctctggcgccccagcagtttcagaatgtcccgatactcctgcagcacgcccggaccgcggcgattatgcagacgcgcgcgggcgacgcgggtcaccccggacaacagcggcgcgacggcgaacagcaccagcgcctgcaacaatgcaattaatacgctcattctcaggctcctcgggaaataacaatcaccaccagtaccgccagctccaccagcgccacgccgcgaaacagcgcgggcgcggaagcgttctgccagccgggcaccaggcgcaccgggttcagccagtggcgcagtttcagaatcggcgcaaaggcttctttcaccggcatggcgaaaccgtgggcggtcaccaccatggatttttcatggtcgtagccgcagacccaggccgccccgcgggagcgcgccggcaggcgatcgcccttgaagaagatcatcagcagcagcggcagcagcgggcaggcaatcagcagaatggcgatcatcggctgggacaccgcgctggagacctccgcctgcaccggaaacgccccgctcaccagcggcagcagccacggcgcggcaaccccgccaatcacgcagcagacggcggccagcaccacgctaaaggtcatcagccccggcgcgcaggtggcgttttccgcctctttgcttcgcggcgcgccgaggaaggtgacgccgtagactttcgccatacacatcaccgccagcgcgccggtaatcgccaggcccaccgccagcagcggcccgagcaggcggccaacaaacgcgtcgccggtgctcagcttaaagaaggactgatagataacccactccccggcaaagccgttcagcggcggcagcgcggccatcgccatcagacccaccagcatcgaaagggaaatcagcggcattttcttgccgatcccgccgagcttttcgatatcgcgatggccggtgcggaaccacaccgcccccgcgccgaggaacagggtggttttaaacaggctatggttgatcaggtgatacatgccgccaataaagcccagcaccatcagggtcgggttatgggtcgccacgccggtgacgaacgccccgaggccgagcaggataatgccgatgttttccagggtgtggtacgccagcaggcgctgaatattgtgctccatcagggcgtacagcccgccgacgaaggcggtgatcatccccagcaccagcagcatcacgccccaccacagcggcggtacgctgccggccagcgagaccgtcaggatgccgtagagaccgaccttcatcaccaccgtggaaaacagcgcggcggccggcgcgctggcgccggcgtgggcctgcggcgcccagccgtgcagcggaataactccggccagcagcgcaaagccgaccaggcccggcagccacagcagcgcgttctgcggcgccgccatcgccagctgggtaatctgcgccagctcaagggtgccgtaggacgaccagaccagccagcagctccacgccatcagcagcgtaccgaggcgacccagcgcaaaccacagcttgccggactgcgcgcagccggtaagaaacgcggcgcaaagggccataatctccgccatcaccaccagcgcgccgaagttcgtcaccacaacggcgcagacggcggcggccagcagcagattcaccagcaggccgttggctttcacctgcggatgacgatgccaggcgatattgaacagcgaaatcggcagcgccgacaggccgatcgccagcagccacagcgcgttgacgccgcccacgcgcagggtcaaatgcagcatctgcagcatgccgccgctaacgcgctccggcatcagcagcgccgttccgcccgccagcaccagcatcgcgctggcgaccgcgccgccaatcccggagatcgccccgctcagcggtttgcgcagggcgaacagaaacgccagcaccgcgctggcggcgtaccaggccaccgcctgattcactaaggaaatcacactcatttcacgtccccttgttgcgcctggaacagcgacagatcgccgagatcggtattaaaagtcagctgccgcttacgcttgctggcctgggcgatatcgcggatatccaccagcagcagcgctttggtcggacaggtgcgtacgcacgccgggccctgctcatcgaagtggcacaggtcgcatttgacggcgatggcgcgcacgcccggcacccagtcgagcagcgagctgacgcgggccggcgccggcggcgcggcgggggccaggggcgtattggcgttagccggcatatccagcggacggctgccggaaaactcaatggcgccgaacggacaggcgatgccgcacagcttgcagcttacgcacaggttctcattgagctgcaccgcgccatcgacgcgattaatggcgttaaccgggcagacggcggcgcagggcgcatcttcacagtggtggcacatctgcggcgcggattctttttcattgcgcattaaatgcagccggggcatggcctgcaggccctgctggcggtgagtctcagcgcaggcggcttcgcaggtgcgacagccgatacagacggtggagtcagcaattacaaaacggttcaccgggtcatcctcaggtgaaagtcatttttgacgaaaacaggttgcgcaggtgtcagcttcgacacttgtcgacacctgacgattaacgggccagcgtcaggtggcttaaatccaccggctggtcttgttcgatagcctcgtagagacggtcgtaaacgctggcgatagtcgccagatagtgctccagaacctgctcgcgatcgcggttgctgatccggccatcaatggtgccgtctgaacccagcgtggcctgggcaatcaggcgtctgtcgtcgccgtttttggtttcgacgtagtactcgatggtgtggctgttaaagccctccgccagcgccacgtagacctgaaagtggccaaaaagtacgaagcacagctctttatccggcgcgcagctcatggcgtgatgcagacgcgctttcgacagggttattccctgtaccagcgagttgcaataggtgtgccactgctcctgatgctggcggtgacgatcggcgatgtagtccgccttttcacttaattcccaaatagtcatcccggatcccccgttgtatgagatgcaccggttaagcacttttcatgccaaaatttaattaattgattttaaacatatttataaaatttcgggaggtagaaagacatgtcgatgacgacgtctgcagcgtgtcatcgacattttcgtgacattacctatgacctggcatcgttattgcattgaagggccatcgcgatacggaggcaccatgcacgaaatcactcttagccagcgggcgctggaaattatcgaacagcaggcgctgcaggccggcgcgcgtcgggtgaccggcgtgtggctaaaggtcggggcgttttcctgcgtggaggccagcgcgctgaccttctgctttgagctggtgtgccgcggcacgctggcggagggctgcgagctgcatatcgccgaacaacaggctgaatgctggtgtgaatcctgccagcagtacgtgcatctcatctcccagcacgtgcgccgctgcccgcagtgtcagagcgaccggctgcaaatcgtggcggatgacggcttacagattcagcgactagaagtggagtaataagattatgtgtacaacctgcggctgcggtgaaggcaacctttatatagaaggcgacgagcataacccgcattcggcgtttcgcagcgcccccttcgcgcccgccccgcgccagatgatgaacattaccggcgtgaaaaccgataacttttcccccacccgctcggaggctggcgacctgcactacggtcacggcgaggcgggtacccatgcgccgggccagagccagcggcggatgctggaagtggaaatcgacgtgctggataaaaacaaccgtctggccgcccgcaaccgcgcgcgcttcgccgctaaaaaccagctggtgctgaacctggtctccagccccggctccggcaaaaccaccctgctgacggaaaccctgctgcggctgaaagagaaaaccgcctgcgcggtgattgaaggcgatcagcaaacggtgaacgacgccgcgcgcatccgcgccaccggcaccccggcgattcaggtcaacaccggcaaaggctgccatctcgacgcgcagatgatcgccgacgccgcgccgcgcctgccgctggatgaccacgggatcctgtttatcgaaaacgtcggtaacctggtgtgtccggcgagctttgacctcggcgaacgtcataaagtggcggtgctgtcggtaaccgaaggcgaagacaagccgctgaagtatccgcatatgttcgccgccgccagcctgatgctgcttaacaaggtcgacctgctgccgtatctcaactttgacgtggagaagtgtctggcctgcgcccgcgaggtgaacccggatattgacatcatcctgctttccgccaccagcggcgaaggcatggaccagtggcttagctggctggagacgcaacaatgtgcataggcattcccggacaaatctgcgccattgacggcaatctggcgaaggtcgaagtgtgcggcattcagcgcgaagtcgacctgaccctggtgggcgcggttgacgatcgcggccagccgcgtctcggccagtgggtgctggtccacgtgggtttcgccatgagcgtgattaacgaagccgaagcccgcgataccctcgaggcgctgcaaaatatgtttgaagtcgagccggacgtcggcgcgctgctgtacggcgaggagcggtaaatgcgctatgtcgatgaataccgcgccccggaacaggtgatgcagctggtggaacacctccggcagcgcgcgcgcctgctgccgcataccgccgaacgtccgctgcgcattatggaagtgtgcggcggtcatacccacgccatttttaaatttggtctcgaccagctgctgccggaaaatatcgagtttattcacggccccggctgcccggtgtgcgtgctgccgatggggcgcatcgacgcctgtatcgatatcgccagccgtccgggggtgattttctgcacctttggcgacgccatgcgcgtgccgggaaaaaacggctcgctgctgcaggctaaatcgcgcggcgccgacgtccgcatcgtctattcgccgatggacgccctgaagctggcgcagcagcaccccgagcgtgaagtggtgttcttcggccttggttttgaaacgacgatgcccgccaccgccctgaccctgcgccaggcccgcgagcgcggcgtcgccaacttctattttttctgccagcacatcaccctgctgccgaccctgcgcagcctgctcgaccagccggataacggtatcgacgcgtttctcgcccccggtcacgtcagcatggtgattggcaccgacgcctacggatttatcgccagcgactatcatcgtcctttagtggtggcaggattcgaaccgcttgatctactgcaaggcgcggtgatgctggttgagcagacaatagcgcggcacagcgacgtggagaaccagtatcgccgggtggtgcccgatgcgggcaacccgctggcgcagtcggccatcgccgaggtgttttgccttagcggcgatagcgagtggcgcggtctgggggtgattaacgactccggcgtgcatctgacggccgcgtatcagcgtttcgacgccgaagcgcatttccgcccggcgccgcagcgggtcagcgacgacccgcgcgcccgctgcggcgaggtgctgaccggccgctgcaaaccgcaccagtgcccgctattcggcaatacctgcaacccgcagagcgcgttcggcgcgctgatggtctcatcggagggcgcctgtgccgcctggtatcaatatcgcagtcaggaaatcgaagcatgaaaagcgttcagttagcccacggtagcggcggtctggcaatgcagcagctgatcggcgacctgtttatgcaggctttcgccaacccctggctggcggagcaggaagatcaggcgcgtctcgatctcgcccagcttagcgcgcagggcgacaggctcgccttctccaccgacagctacgtcatcgatccgctgtttttcccaggcggcaacatcggcaagctggcggtctgcggcacggccaacgatgtggcggtgagcggcgcgctgccgcgctatctctcctgcgggtttattctcgaagaggggctggagatggccaccctcgaagcggtggtgaacagcatggcgcagaccgcgcgggaggccggcatcgccattgtcaccggcgataccaaagtggtgccgcgcggggcggcggataagctgtttatcaataccgccgggatcggcgtcatccctaccggtattcgctggggggcgcagcagattagcgcgggagacgtgctgctggtcagcggcacgcttggcgatcacggggcaacgatcctcaacctgcgcgaacagatggggcttgacggcgcgctgtccagcgactgcgcggtgctgacgcccttgattcagacgctgcgcgacgttgctggcgtgaaagccctgcgcgatgccacccgcggcggcgttaacgcggtggcccatgagtttgccgccgccagcggctgcgggattgaactgcacgagaataagctgccggtgaacgataccgtgcgcggcgtgtgcgagctgctggggctggacgcgcttaatttcgccaacgagggcaagctgctgatcgccgttgcccgcgaggcggcggaaagcgtacttgcgcatttacggtctcatccattaggccgcgatgcggcgataatcggcgaggttgtgccgcgcgcgggcgtgcgctctgttggtctgtacggcgtgaagcgcacgctggatcttcctcacgccgagccgctgccgagaatttgttaacggtgcgggaccccggattgcggctaaagccttatccgggctacaaaactgcgcgcacctgtagtccggctaagcgcagcgcgagccgggaaaagccagcatgattatccagcccaaaccagcgggcacccacggatgggttaatggcggtcacaaccgctttattaacagactattatttgtgtcatcactttcttctgcgccgctttgcggcgcttttggacttaagcaatgtcgtatacaccgatgggcgatcttgggcagcagggtctgtttgatatcacccgcattttattacagcagccggatctggccgcgctgagcgagacgctgaccggcctggtgcagcagtccgcgctcgccgaccgggcggcgattattctgtggcattccggcaaccatcgcgcggtccggcacgcctgcgacgacgcggggcagccggtgagctacgaggatgaaaccgtcctcgccaacggcccggttcgacgcctgctctcgcgcccggatgcgctgcattgcgatagcgccacctttgccgaaacctggccgcagctcgccgtaagcggactctaccccacctttggctattactgcctgctgccgctggcggcggaagggcgtattttcggcggctgcgaatttattcgcgacgacaaccggccgtggaccgaaaaagagtaccagcggctgcacacctttacgcaaatcgttgccgtggtcaccgaacagatccaaagccgggtcagcaacaacgttgattacgacctgctgtgccgggaacgcgacaacttccgcatcctggtggcgatcaccaacgcggtactctcgcggctggatatcgacgaactggtcagcgaagtggccaaagagatccaccgctacttccgcatcgacgccatcagcgtggtactgcgcagcaaccgcaaaggcaagctcaatatttactccacccactacctcgacgccagccacccggtgcacgaccagagcgaagtggacgaagccggtaccctgaccgaacgggtattcaaaagcaaagagatgctgctgctcaacctgcatcagcacgacccgctggcgccgtacgaaaaaatgcttttcgagatgtgggataacaaaattcagaccctgtgcctgctgccgttgatgtccggcaataccctgcttggggtgctgaagctggcgcagtgcgatgagaaagtcttcaccaccaccaacctcaagctgctgcggcaaatcgcagagcgcgtctcgatcgccatcgacaacgccctcgcctaccgcgagattcagcggctgaaagagcggctggtcgatgagaacctcgccctgaccgaacagcttaacaacgtcgagagcgagtttggcgaaatcatcggccgcagcgaggccatgaacagcgtgctcaagcaggtggagatggtggcgcagagcgacagcacggtgctaatcctcggcgaaaccggcaccggtaaggagctgattgcccgcgctattcataatctgagcggccgcaatagccgccggatggtcaaaatgaactgcgcggcgatgcccgccgggctgctggaaagcgacctgtttggccacgagcgcggcgccttcaccggcgccagcgcccagcgtatcggccgtttcgaactggcggacaaaagctcgctgtttctcgatgaagtgggcgacatgccgattgaactacagccgaaactgctgcgcgtattgcaggagcaggagttcgagcgtctcggcagcaataagctgattcacaccgacgtgcgcctgatcgccgccaccaaccgcgatcttaagcaaatggtcgccgatcgcgagtttcgcagcgatctctactatcggctgaacgtcttcccgatccacctgcctcccctgcgcgagcggccggaggatattcccctgctggtgaaggccttcacctttaaaattgcccgccgtctcgggcgcaacattgacagcattccggcggaaacgctgcgcctgctcagccgcatggagtggccgggtaacgtgcgcgaactggagaacgtcattgagcgcgcggtgctgctgacccgcggcagcgtgctgcagctctccttaccggaaatgagtatcgagacggagccgctggcggcggaagtgctgccggaggaaggggaagacgaataccagctgattgtccgggtgctgaaagagagcaacggcgtggtcgccggaccgaagggcgcggcccagcgtctgggattaaagcgcacgacgctgctttcgcgcatgaaacggttgggtattaataaagaccagctgcagtaggcacatcttcagaacgctgtttcattttgattttaatgaaacagcgttctgtgagacaactcgctttacccgttcctgatgaatgataaataagccttttccttaatggagatgcttatgacgcgtttacctctggccgccgccatcgctttgcttttggcttctcaggctgcattttcctctcttcccaccttttccgtctggcccggcggtgaagcgcccggcgcgaaaaacagcccggcgagcgaatcgctggtggagcgcagcaaagatccctcgctgcccgatcgcgcggtcaccggcgttcgcgctccgacaattaccgtttacgcgccggagaagcccaacggtatcgcgctgctggtgacgccgggcggctcttaccagcgagtggtattggataaagagggcagcgatctcaccccggtatttaacgcccggggctataccctgtttgtgatgacctaccggatgccggcggacggtcacgcggaaggcagcgaggcgccgttggccgatgcgcagcgcgcgctgcgtaccctgcgggcgcgggccgccgagtggcatatcgacccgcaaaaaatcggcattatgggcttttccgccgggggacacgtggcggcaagcctggagacccgctatagcgaaccggcttacgccgccgtggacgcggttgaccagcagagcgcgcggccggacttcgcggtgctcggctatccggttatttccatggatccggcgattgcccatcccggatcgcgcaaggcattgattggcgaaacggcgacggcagagcggcagcaccgctattcaccggagcagaacgtcacgccgcaaacgccgccgacctttattttccacgcggtggacgatccttccgtgccggtggataacgcgctggtgatgtttaacgccctgcgcgcgcagcaggtgccgaccgagctgcatctgttcgccgaggggaaacacggatttggcattcgcgggacccggggcctgcccgccgccgagtggccgcagctggcgatgaactggatagcctcgctggcggaaatgaaaaaatagcgccggtaatccccggctcgcggctgacgccttagccgggctacctgtccgcagacggcggggacctcgaagccccggtaggtacggtttcccggaggcgatgctgcgcatctgtccgggctacaagttcgtgcggtttagtagcccggacaggcgcgtcaagcgccgcctccgggggattttgccgagctatttatcagaactgaagccgttgctggtcgccagttcggcaaaccacagcgcgttgcgctttatctgccgctctccggtttgcaggttgagccgccagaaaccgtagcggcgcttgaacgagttaatccacgaccagttatcgataaaggtccactgatgcacgccaaagcagttcgcgccgtcggctatcgcgcgatgcagctgcaccagatgctcttccatcaggccgatgcggaacgaatcgtcaatcaccccgtctgcgccgggttcgccttccgactcaatatccatcgcaataccaatttccgcgaggaaccactttatattgccgtagttatcgcgaatattggcggcaatgtcataaatcgcctgcggcagaatctcattattatcgcgataaggattaaagcgtccttgcggattcacgtagttttcgaaatagaactccggggtgaaatagtccagcgtatagtcgctttcgcgcgccttcacccggcgcggaacgtaatagttaacgccgagaaaatcgacgcgcgatccggtaatcagctccacgtcggcttttgtcacctccggcaggcagtcgtgcgcggccagaatttcgcacagcgctttcgggaactgatgcttcaccagcggatcgaggaagctgcggttgaagaacagatccgcataccacgccgctttttggtcttccgcgctgtcgttgcgggtataggacggcgtcagattcagcaccacgccaatctcgctttccagcgccagcgcgcgaaactcgcgcaccgctttggcgtgggccagcataatgttaaacgccacctgcgccgccagcctgccgtctttcttgcagggatagtggaagtcgtacaggtagccgccctcaaccggcacaatcggctcgttgaaggtaatccagtatttcaccttgtgaccgaatagctcaaaagcggtacgggcaaaacgcgcgaaaagatcggtcacgtgcgccgactcaaagccgccgtactgcttttgcagcgcttccggcatgtcaaaatgatagaggttgatcatcggctcgatgccgttttcaatcatctcatcaaggtaggcatgatagaaacgcaccgcgtccgcattgggcgcgccggtttcgaagtcgtcaatcagccgcgaccactgaatcgacgtgcggaaggagttgaacccggtccgcttcatcaacgccacgtcctggggatactgatgataggtgtcgcaaacggtttgcggcccaatctgctgataaaaacgttccggctgttcggcaaaccagctatcccaaatagaacggtgcggcttgttgcttatcccttccgtttgcggaccggatgccgccgcgccccataaaaagccttccggaaactgataccgggtcataacgcctcctgtaagttaaaaaaggccgcacccaacgggcgcagccaataagcactactctgcaaccacttcaatcgatttgataaacatgtagccccagtcgccggcgaatttaccgaagtcgatgcggttatcgccggccttcagctcaaccggcaccagcagctgctggccctgctcatcggtctgcgggaattcaaccgcgattggcgcgccgtcgttgacgataaacgagtttttcttgctgccccatttgccgctgaacgtcacccgcagctgatacttgccggcccacggcgcggaaacctgccagctgaccttatccccgtcgttggcgaacggtccgaggaagccgtcgtcgccaatcgccagcgcgtctttttcgcttttcgccgccgcaatcttgccatcggtcacgttcaataccccgccgccaaaacggcagtagtcggcggcgactttaccgacggcttccgtcaccgtgaccttaacggttttgctgcttttgagcaggccgtcatcggcgctaaaagtcagcgcgtattcaccgggagcgctgaaccaggcgcgggtttcggctttatccgtcgcgcagaagtgggcctgcgcgctgccgccgttgctccagctcaccgtcacgttgcggtccgggagggcgtcatcgcgccagctcgcgctgagctgcacgccctggtcctggctggtggtgagcgtctccgccagcgccactactggcgcctgattcgcctgagaatgcttcacgctaatcacgttcgaaggcgatgaactgccgctctcgtttttagcgatgacgcggtaatagtacgtattccccagccgcagactgcgatagtcatcgcggaacagatccatcgtctgcgggttccactcgttaacgccgtcggaaatgtcgcgccccacgaccttccacggtccggatgccgaatcggcgcgctcaacatcataggcgcgccctaccgccgcccccagccagttgatcgcaaacggtgaatccgttggccgcagcgtcggcgcgtcaggtttcggcagcggcggcgctttctcctgcccgttcatctgcgcggcggcggtgcgcaccaggtcgaccacctccatctcctggttggccttaccttcgaccgggaagcccggcagatggtagctgtagtggccggtggactctttgtgccagtagaagccgccgtcgtgacgatgaccgcggaagccccagattaaaccgcccgccgcctgcgcgccgttgacttcgctatggacgatcgactgcataatggcgttaagctgctgcgcgtccagcaggccaaattcgcccaccatgtagactttcttacccgctgccgccgtcaggtcttttttcacctgttcgggatggttgttatcggcattggtgtagtaatggttgctgacgatatcgacatggggatcgttaagcgcaaacgcattaattttcttgtaggtgccatccaccaccagctggtgcggcgcccactttttgatccacgcggcggtctgctgaaggaacgccgcgttggtgtcctccagctcgttgccggtctcccaggccataatcgctttttcgtcgtaataggggcgcccggtcacgctgttggtacgggtgataacctgacgaatcacgtccagataggccttgaaggttttactgtcggtacggtaaaaatcctccggcttttcgtggtagaacgccgccagctgctcgcgaccgccccaccaccaccagtgatcgataaacggcagaatcaggcgcagcccctgtttgtccgcctcggcgatcatgttgtcgtacacccgcatcgccttttcgttcaggcgcggcatgccgtcggcggtttccggggccagaatatgggtttcgcgaccgcaggcctcgtcaaacgtctgctgcaccgagagcacgtatacccgctgcgccctggcgccggtttgcacgagcgctttaatccagttttcctgttcctccgccgtcggccagcggaagtattgcccccagccgcgcgagtcggccttgcagataccgcgcgcatcgtcctcgatacggtgcagttccggcgcatgaatgcccgcaaagcggaacaccttgtcgccatcttttaacgttgcgccgtcgcgggtaataaagtgttcaaagtgcgactgctccgcggccatcgcgcctgcgcttcccagcgccgaaagcagcgcgacgagcatcagttttttcaccggcttaatcatcgttatctctccttagaaccagacttcggcctgcacgccgaaattcagcgtatcggtgtcgccgctgcgcgagtagctaccggcggaaagggtattggtgctccagtcgtagttgccgtccagcgcgtcggacacccctttatcccacttcgcgtaagtcacgaagaagcgcagctgcgggcgagtccagaagccggaatcaaaggtcagggtcggcgcgatggtcactttagtcaggccgcctttgcctttgccgtccacgcctttgtagtttttatcgtcgagatattcgtagcccagctcgtactgcatggcgaagtttttggtgatctgctggtacgggcgaatccccgccacccagctggtgcgcccccagccttcggcgtcttccgtccaccagcggtagtttttgtctttctgatagtaggcgaacgtggagatttcccagtcgccgagcgaggccatgttatccagcaccacgcgccaggactgggtatcgtcgaggtttgcccagccccagccgtttttacccagcgagtctcccgccgccaggccgcgcccgtactggaagaccacgcgagagtagccgccggtcaggccgtaaaagccgtcaaagttgtaaacgccggtcacgccgtagcccttctccgccgaggtcgggtgcttctcgttgcggttcatgtggtggccaatcagctcaagatcgaagccggtgccgccgatctttttcagccacaggttgagcgagtagtcatccggatagccctgatcgcctttatcgaccgggtaggctttggtttcatccgtcggcgagaaggcgtaaaccccggcatcgaagcgcgcgaagccgagatccatgttgtcgaagccgccgccggtaccgttgtactgaatgtactcccagtcgaactggtggctggaggtgttggagctgctgtagcgcttaccggcccagaaggtcatttccggggcgaagtcgaggtttgacagttcggcaaaaccctcacggaactgcacatcatgcccgtcgtcatcctgacagttccagtctgaggtgcatttcgactgatgggtaatgttggcctggactttagccaccacgccgctgtccgaggttaacgtcaccgtcgggatcagttcgatcttggtgtcctcttcgttgcccagacgccacttgccgtccggcatcaggccaacggagtcggcgcggttaccgtcggcgttggcgaggatccccgaacggatatagccgtggagcataaaatcgtacttcggatcggcgatggcgcagtcgctcatcaccgcgagggcgagtaaagacagaggtattgaatgatttagcctgatcattttttatccttggttatttttttattaacactgcctgagaacgggaggaaatttacggatcaaaactggaaatgtacatccgttaatggaaaacgctttccgtaattgccggatgagttcacaaatttaacgatagcgggcaaatattcgtgatttagatcacgtctttaagcggaaataaaaaagcccgcgcgcggcgggctgtggcaggcaggcgaaaagcttagcgttcggcatcggcgagctgccgttcatagaccttgaagaacggacgatagagcatccaggcattaaaaatggcgaacaggcacatgcagaggtttttccagctgccgttggctgaccacgccgcgccgagcggcgccggcatcgaccacggcagcatcgccaccgcccgatcgagaaccccaagatgggttaaataccaggcgatacaggcatttatcagcggcacaaaaagaaacggcagcaggaaaaccgggttcatgataatcggaaagccgaacaatatcggctcattgatgttaaacagcgagggcagcaggccaattttccccacgcttttcagctgccgcgaacggctgcgcatcgccataaacaccagcggcagcgtcgagccgataccgccgatcagcaggtagaaatcccagaatccctgcaggtagatatgcggcagcgtagcggaaccggcggccagcacctgctggttttcaaacagataggtcatccagaacgggttcataatcccggtgataatcagcgcgccgtgaatgccgacaaaccaaagcaggttgcagataaataaagaaattaataccgcagttagggtatcggacgccaccaccagcggccgcaccgcttcgctaatcagctccggtaaaatgcgcccggtgctctgcagcagcagcgcgttgatgacgctaatagagagcagcaccaccagcagcgggatcagcagctgaaagccgttgcgggtcatcaccggcacctcttccggcaggcggatgcaccagcctttcttatagaaaaagcgcacgatttcaatagagtaagtgcttgaaatcagcgcggtaaaaatccccattccgccgaggaaaatattggtcgcgccgttgtcgcgaaagccgataaacagcaaaaacgccaggcagccggtcagcccgcagagccgctccggcagccggtactgcttggcaaggctggcgctggcgccgaaggccacaatcagcgccaccagcccgatagtcaattcaaaggttggcagcagaatgggccgcagctggaaatagaactggccgaaagccgatgcgccgttaatggaaacgggcggaaacaaaatcggcaccagcaaacttcccacaatcacaaacggcatcgccagcgcaaagctgtcgcgcatcgccgtaatgtggttattgcgcgtcagaacgttggccagcggcgccagccgctgctcgatgatatcgacggcaacattcatcaactgaatgttcataatcctgcctttaagaatagaggtgtcgccaggatgatcgcgcactcccgggtaaagtaaaagcccgccataggtgatcgtggtcacaataaataaatccacaaacggaagcgctttccgttttatatccgttatgactatagtcggcgcatccatctcatcaggagcgatatatgaaaaagataatgttgtgctgttccgcgggcatgtccaccagcctgctggtgaaaaaaatgatcgccgaagccgagcagcgcggtctgccggtggagatcaacgcctttggcgtcgcggaattcgatcaacaggtcggccattaccaggtggtcctgctggggccgcaggtgaaatacatgcagaaagatctgcaaaagcaggctgataaatacggtatccgcgtggaacccatcaatatgatggattacggcatgcagaaaggcggcgccgtactggatttcgcgctttcccttatcgataacaaaaactaaggaaagatcatgagctctctgtacgcgaagctgatcgccgtgattgaacagaagatcacgcctatggcgggggcgatcggccaacaaaaatacgtcacctccatccgcgacggttttattaccgccctgccctttatgatcgtcggctcgtttttgctggtctttatcttcccgccgttttccccggatacgacgtggggctttgcccgcgcctggctgcaattttcgctcgatcatcgcgatgcgctgatgctgccgtttaacttcagcatgggggtgatgacgctgtttatcgccgtcgggatcgccgccagcctggcaaaacaccataacctggactcgctgaccgccgggatgctgtcgctgatgtcgttcctgctggtggccgcgccgctgaaagatggccagatctccaccgcctacttctccggccaggggatcttcaccgcaattctggtggcgatttactctaccgagctgtacgccttcctcaagcgccacaatattacgatccgtctgccgcctgaagtgccggcgggcgtggcgcgctcgtttgagatcctgatcccggtgctggcgatcgtgctgacgctgcatccgctgaatctgtttatcgaagcgcagctgggcatgatcatcccggaagcgatcatgtcgctggtgaaaccgctggtggcggcgtccgataccctaccggcgattctgctgtcggtgctggtgtgccaggtgctgtggttcgccggcattcacggggcgctgatcgtcaccgggattatgaatccgttctggatggcgaacctgtcgatcaaccaggcggcgatggccgcaggcaccgcgatcccgcatatctatgtccagggcttctgggatcactatctgctgatcggcggcgtcggctccaccctgccgctggctttgatgctgctgcgcagtaaggcggtgcatctgcggacgattggccggatgggcgtagtgccgggcgtatttaacatcaacgaaccgattctgttcggcgcgccgatcattatgaatccgctgttcttcctgccgttcgtgctggtgccgatgatcaacgcaaccctggcctactttgcgctgaagctggacctggtgagccgcgtggtgtcgatgacgccgtggacgacgccggcccctatcggcgcctcgtgggcggcgaactggagctttagcccggtgatcatgtgcctgatttgcatggcgacggcgatggtgatgtatctgccgttcctcaaagcctacgaaaaacagctgctggagcaggagcacgctaacgcggcggcccaggccgaaagcgcgccgcagtccgcataattcatactattcagaggtttgtcatggaattagaagaacaggtaatgggtatcatcatcaacgccggccagtcgcgtagcctgtgctacgaagcgctgagctgcgctaaagcgggtgatttcgccgccgccgacgaaaaaatgaaagaagcggcgcattttgcccgcgaggcgcatttggtacagacccagctgattgaggccgacgaaggcgagggtaaaaccaaaatgaccctggtgatggttcacgctcaggatcatctgatgacctcgattctggcgaaagagctgatcggcgaactgatcgccatttaccgctcgcgaccgctgcacgcgtagggttccccctctccgggggagaggagatgacgtagcccgggtaaggcgttgacgccgcaacccgggaaaacggtaaatgctcatgtcacctggctggcttcccggctcgcgttgcgcttagccgggctacctgaactacacgcgtagcggcccgggaaaccgtcgaccacaattaaggacaaccatgctacatctgggtttagacattggcggcaccaaaatggaagccgtcctgctcaacgcggcgggcgagtgcgtctatcgccagcgccgtccgacgcataaagagagctatcaggcgtttatgcagcagctgctcgggctgattgcgaccgtccgcgactggagcgaacggccgtttactctcggcatcggcctgccgggggctatcgacccgcaaagcggcctgattaaaaactgtaactgtctggtgctcaacggccacgacctgcgtcatgacctgatgcgggaacttggtcaaccggtatggatggcgaacgatgccgactgcttcaccctctctgaggcggtagacggcgcgggcgcgggggcaacgaccgtattcggcgttatcatcggtaccggctgcggcggcggcgtcgcggtgaaccaacggctgctcagcgggcctaacgccatcgctggcgaatggggacacaatcctctgccgggctattgccccgagcgcgacggcccggcgcagccctgctactgcggcaaagagaactgcatcgaaagctttatctccggtaccggctttgcccgccgctacggcgagcaggcgccagcggaagcgattatcgccgccgcgcaaaacggcgaaccgcaggcgcaggcccactggcggcattttattgacgctttcggccgtagcctggcgtcggtaatcaatatcctcgatccgcaggtgattgtactgggcggcgggctctccaacgtcgggcaaatctatgagcagctgccgtcggcgatcgtcccgtatatcttctccgatagctgccgaacgcagatcaaacaggcccgcttcggcgacgccagcggcgtgcgcggcgcggcctggctgccggttctggccgacgctgaagccggtcggcggtagacacttttttcagcaggtatgctaagctaggcgaaaatattcagacagaaaatgccatgccaaccattgatgatgtttcaagattagcgaatgtctcccgagcgacggtatcccgcgtgctgaccggcaccaggggcgtgcgcgaagagagccgggaagcggtgctgcgcgcggtagaggaacttaactaccgcccgagctttgccgcgcaaaacctcgccagtcagacatccaatcacgtggggctggtgatcccggcgaacgatgatagcagcggcgcgcgcctgctgccgatgctctcgctagcgctgaaggggctgaataaaaacctgattgttcagtacgtcacggatgcggcggaacaggcggcggtcgtcgacgatttacagcgccagtgcgtggcggtggtggtgctcggcgccgtcccggcggatgcgccgcgcaacgtgatctcctttgaccgcttcagcattgccggggtcaataatcagggctacgactacgcttttgccaccgaaagcgcctgccgctacgtgatcggcaagggccatcgcaatatcgcgctgctcgttgataacgacagcgatgacgccagccgccagatgctcgaaggctatcgcaacgtcctgcaaaactactccatcccttttaaccggcagctgatgctggcggccaacgataacgttgaacaggcgctgctgacgctgattaacagcttcagcaaatactcggtgattatcgtgaaacgggaccgctacgccgccgaagcgatgcgcctgctgcgcgagttcaacgttgccgtaccgcaggaggtctcgctgctgagcctggaagattctcccctcgcctcgctgctcaatccgccgctgacctgtatctcctggccgctggagcagctgatggaaaactgcctgcagcgtatccgcaacctgatagacgagcgccccaccttctctcctgaagggcgcacgctggcgggccgcctgatcccccgccagtcggtggccgatctctcctgatttcagcgtccggccttccgcgtggccgggccttttcctctcccgccgcgggttcgcacgctaatcattcgcctcacatctaaataagaattattttcatttataaatagcttgtgctatataacatagcaatggctataaatgatgattaattaaccgcaacgttgtgagggaccttatgctgcacctgccacccctgaagcatctgatgtttgccgccacgctggcgctgctggccgtcgcccccgtccaggcaaaagagaaatttaaagtgattaccaccttcacggtgatcgccgatatggcgcaaaacgtcgcgggcgacgccgccgacgtcagctccatcaccaaaccgggggccgagatccatgaatatcagccgacccccggggatatcaaacgcgcgcagggcgcgcagctgatcctcgccaacggcctgaaccttgaactgtggttcgcccgcttttatcagcacttaaacggcgtaccggaagtggtggtcagcaacggcattcagccgatgggcatcagcgaagggccgtataacggcaaacctaacccgcacgcgtggatgtcggcggacaatgcgctgatctacgtcgataatattcgcgacgcgctggtgaaatacgatcctgcgaacgccgatgcctatcgccacaacgccgaagcctacaaagagaagatccgccagaccatggcgccgctgaaggcggaactggcgaagctgccgcaggataagcgctggctggtgaccagcgagggcgcgttctcctatctggcccgcgataacggcctccaggagcgctatctgtggccgataaacgccgaccagcagggcaccccgcagcaggtgcgcaaaaccatcgacaccatgaagaaagagcggatcccgactatctttagcgaaagcaccatctctgataaaccggcgcgtcaggtggcccgggaggccggcgcccactacggcggcgtcctgtacgtcgactctctgagcgccgccgatggcccggtgccgacctatctcgacctgctgcgcgtcaccactcaaaccatcgtccagggcatcaacgacggactaaggaaacaggcatgagtcacgagctgccgggcctcgcggtcaacaacgtcagcgtcacctaccgcaacggtcataccgcgctgcgcgatgcttcgtttagcgtcccacgcagcgccatcgcggcgctggtcggggtgaacggctcgggaaaatcgacgctgtttaaagcgctgatgggctttgtgcgcgtcggaaaaggcgatattgcgattctcggtcagccggttaatcgcgccctgcggcagaacctcgtcgcctacgttccgcaggcggaagaggtggactggtccttcccggtgctggtggaagatgtggtgatgatggggcgctatggccatatgggctggctacggcgggccaaaccgcgcgaccatgagattgtcgacgccgccctggcgcgggtcggtatgagcgagtaccgccaccgccagatcggcgaactctccggcgggcagaaaaagcgcgtgtttctggcccgcgctatcgctcagcagggaaaagtcattctgctggatgaaccctttaccggcgtcgacgtgcagaccgaagcgcgcatcatcgagctgctgcgggaactgcgcgacgaaggctgcaccatgctggtttccactcacaacctcggctcggtaagcgagttctgcgactacacggtgatggtcaaaggcaccgtgctggccagcggcccgacggaaagcacctttaccgccgaaaacctcgaactggcgtttagcggcgtgctgcgccacgtggtgctgagcggcgcggaagagcggattatcaccgacgatgagcggccgtttatcagccgtcgggcggcgggaggcgaaagatgagctggctactggagccgtttggttatcactatatgctgaacgcgatgtgggtctcggcgctggtgggcggggtgtgcgcgtttctctcctgctacctgatgcttaaaggctggtcgctgattggcgacgccctctcccactccatcgtgcccggcgtggcgggcgcttatatgctcggtctgcccttcgcgctgggggcgtttctttccggcggcctggcggcgggcagcatgctgtttcttaaccagcgttcgaagctgaaggaagacgcgattatcggcctgatcttctcctcttttttcggtattggcctgtttatggtgtcgctgaaccccacttcggtgaatatccagaccattattctcggcaatattctggccatcgccccggaggatattatccagctggcggcgattggctctatttcgatggcgattctgctgctgaagtggaaagacctgatggtgacctttttcgatgagaaccacgctcgttccattggcctgaataccaccgcgctgaagctgctgttctttaccctgctggcggcctgtaccgtggcggcgctgcagaccgtcggcgcgtttctggtgatttgcctggtggtgacgcccggggccaccgcctggctgttgaccgaccgcttcccgcgcctgctggcgattgccgtcgcgattggcagcctgaccagctttttcggcgcgtggctgagctactatctggacggggcgaccggggggattatcgtcgtcgcccagacgctgctgtttttagccgcttttgttttcgcgccgaagcacggcctgctcgccagccgtcgccgcgccagggaggcctcatgctgagcgcgctgattgaacctttccagttctcctttatggtcaacgccatactggtggcggcgatcgttgccgtcccctgcgcgctgctgtcggtgtttttggtgctcaagggctgggcgctgatgggcgatgccatgagccacgcggtttttccgggcgtggtggtggcgtatatcctcggtatccccttcgccatcggcgcgtttatcgccgggttgttctgcgccatcgccaccggttatctcgacgataacagccgcattaagcgcgatacgatcatgggcatcgtcttttccgggatgtttggcgcgggcctggtgctgtacgtgtcgattcagtcggaggtccatctcgatcatattctgtttggcgacatgctgggtatttccgccagcgatattgcgcaaacgtcgctgatcgcgctggcgattgcgctgataatcgggcttaagtggcgtgattttctgctgcacgcctttgatccgcagcaggcgaaggccagcggattgcgctgcgggctgctgcattatgggctgctgtgcatgattgcactgaccatcgtggcgacgctgaaagcggtggggatcattttgtcgatttcgctgctgatagcgccgggggcgatcgctctgctgctgacgcggcgttttgtcagcgccctgctgctggcggtggcgatagcgttaagctgttcgctgggcggcgtgtggctgtcgttttatctcgacagcgccccggcgccgaccattgtggtgctgtttaccgtcctgttcgttatagcgtttgtctggacgtcggttcgcgatagtcaaaccacggcccgttccggcgaagccccgggtcgcggctgacgccttacccgggctacagaccgcacgaattgtagcccggctaagcgccgcgcgagccggggagtttattgcggctttttgggccgatacttttccggtaactccggaaccgggcgtttgtcatcgatcaggtggcgaatcgtcaggatcgggtgccgccagagcatccgcggccccgcccagcgcataatctgcttcatctcttcgcgtttcgcgggctgatagcaatgcaccgggcactgcttgcaggcgggcttttcttcgccaaatacgcacttatccagccgcttgtcggcatagccgttgagcgcctgatagtgttcggcgtcgtcgcgggcatccgggcagcggcgctggtagagcgcaatcatgctgctaatggtctttttttcccgcgcaatacgtttgcccgccatcacctgttccccccgataaagatgcattcataatacacattcagagaggacgatgcagccccatactccctgaggattatgccggtttatccacgtgccccagcggtttttccgggaagcacacatcgcgcacccggcgcttgagctccgccgcgtcggggaaaccgccatcctgcttgcgctcccagatttgcacatcatcaacggccaccacgaagatcccgccggttcccggaaccagcgtgaccgaagcgatatcggtgctaaagctgtgcagcagttcctgtgccatccagctggcgcgcagcatccagttgcactgcgaacagtaggtgatggtaatcgcggctttatggctcatcgtcttctcgctgtcggtaaaagggcaaattgtaaacaacttgcagattaattgaagaatacatgattattttgttgcaaacgataatacctatcattaccattcgcaatcaacaagcatggagaaaaaacgtccagtaacggaataacgggacacacctgcactctggaagtaacgcgtgagccaatactaataatgattaaggcgtggctactatgtataactccactcaatcaacagcatggttcaagaaaagcctgctggtgacttctttgcttacagcactttatcagacttccgccggggcggctgataccaccgcgaaaaccaccagcagcgcatcgactgatgacagctcggaacggatgaccgttaccgcgccggcgccgttgctgaaagcgggcagcgaacattcgatcggcgctcaggagctgcaggataaaggggccaacgactttggctcgatcatgcgctacgagccgctcattagcgccaccggcgccagcggcggttccggcaacggcaaaagcggcttcgaccgcggcggctataccggctacaacatacgcggcatggagagcaaccgcgtcgggatcgatgtcgacggcatcgcccagccgaacgccaccgggcgcagctacgccagccgcgcgggccttaataccttcggtatgggccgcgactatattgacccctatatgtacggcagcatcgatattcagtccggggcgacatcaacggaaaccgctaacagcgccatcggcggcaacgtctctttccgcccgaaatccgcggatgactatctgcatccgggcaaaaccagcgccttcggctaccgcagcggctacgactcgtccgatcgcagctggcacaacggcgtcaccattgccggcggcgacgagaccctgcgcgggatcttcgtctacagccgtcgcgacggtcaggagacggaaaataacagcgggaccgttgattcctatccggcaaactggcactcggacgcctttatggcctccgggatctggcagccgaatgacgaacataagttcaccagcaccttcgattattaccataaaacgaaccacacgcattacgacgcctgggactccagcggcaacagcgttatcggtacgtcaaaccagaccagccagacccgccgctggggcctgagcctgaaagacgactggacgccgatgaacgactatatcgacagcgtatcgaccaaagtctactaccagcataccgaggcccatgactggacatatatgccggacagcgtcacccgcgcgatgcaaacggtgagctccgactacgataccgacacctgggggattcagagcgcgctggcgaaatcgataggccgccacgatctgagcgccggttttaacgccagcacgacgaaaacccagcggccgttaacccagtcgccaaccccgagcgcctatagccagattatgcagccggacgccgacagccgcggctatatcgtcgccggcttcctgcaggacaaaattaacttcgacctcgacggccataactttgcggttatcccgggcattcgcgtgatgcatcagtcgaccaaaccggaaaacgtctccgatttggccaacaacagcagcgtgctgaccggttccgacgtgtcaaatctgtacggtaagaacgctgatacccaggcgctgccgtcgctggtcttgcagtacgatatctccccgcgcctgatgacttatctgcagtatcagcgcggcgcgcagttcccgaacgccagccagctgtacggttcgtggaacctcggctccagctacgccggacgcgcccagtatgcgctgatcggcaacaccgatctgaaaaccgaaaccagcgataacgttgagtgggggatgaagggcgaagtggcggaaggcatcaccatgcgcaccgcgctgttctacaacacctataagaactttatcgcctatacccgctacacccgcgccaataatccgacgcagttcactaacgtaccgtcgaacatctacaccatttaccaggcggaaaaccgcgataaagcgtacatctacggcggcgaaatcagcgctaaattcaactttggcacctggtttgaagaggttaacggcctgagcgccaccctcgcttacggctatagtgaagggcaatcgaaatccagctacagcggcgataagtacgtcgacctcgatagcgtcgcgccaatgaaggccatcgtcggcgtggcgtgggacgatccggcaaaagtgtacggcaccgcgctgaccgccacctttgttaagggcaagcgcgccaccgccaccaaccgcgaaagctataccaactccggctccgcgattaccgattcgaccagcgaatatatgcgcgttccgggctacggcatgctggactggaccgcgtactggcaggtcgcgaagaacgtgcgcgtgaacggcggcgtatacaacattaccgatcgtaaatactgggattatctgagcagccgcaatatcgaaacggcgacgaaccaggacgccaacgacagagcgctggcggtgatgcctggccgcacctggcagctgggcgtgaacgtcgatttctgaccggccaataataagaaacctgctccccggccgcgcgccggggaaactcatcgtagagaaggatgtgaattatgcaaaacacccaaccgcaacataccccgctgtggcagcgctatctgaccacgaaagcgcaatcctccgcgaaatacgcccgcgatatcgccgccgaaatggggattagcgaagccgagctgaccgaagcccgcctgggctacgatgccgtacgtctgcaggacgacgcccgcgccattctgacggcgctggaaaccgtgggggaaaccaaatgcatctgccgcaacgaatacgcggtgcatgagcaggtcggcgaatttacccatcagcatctgagcggccacgccgggctggtgcttaatccgcgcgccctcgatctgcgcctgtttctcagccagtgggccagcgcttttcgcctgaacgacaacggccgccagagcatccagttcttcgatccgcacggcgacgcgttgctcaaggtttacaccaccggcaataccgacatggcggcctgggatgcgctgattgccgggcatacgcagcaatcgcctgccccgctggcgattcgcccggccgaaccgctgaaatatgccgactccgccgacgcggcggcgctggaaaatgaatggcgggccatgaccgacgttcaccagttcttcggcctgctgagaaaatatagcctgtcgcgccagcaggctttccgtctggtcagcgacgacctcgcctgccggattgacacccagacgctgccgggcctgctggaaaccatccgccaggatggcaacgagatcatgatttttgtcggcaaccgcggctgcgtgcagatcttcaccggcgcgctggagaaggtcgccccgatgcgcggctggctgaatatcttcaaccccgcgtttaccctgcatctgcgcgaggagagcgtggatgagatctgggtgacccgcaaaccgacctctgacggccacgtcaccagcgtcgagctgtttgccaaagacggcacgcagatcgcacagctgttcggtcaacgcagcgaaggccacccggagcaggcgcagtggcgtgcgcaggtcgatcgtttgaccaccgaaggtctactcgcatgaagcgctggctgatattacttgcggcgtttccgctgttggccagcgccgccgccgagcggattgtgtcactcggcggcgacgtcacggaggtagtttacgccctcgacgcccagcggcagctggtggcaaaagacagtaccagcacctggcctgccgccgcgcagagcctgccggatgtgggctatatccgccagctgaacgccgaggggatcctctccctgcggccgacgctggtgctggccagcgcccaggcgcagccctcgctggtgctgaaaaaggttgaagagaataaggttaaggtgatcaacgtcccgggcggctacgacctgccggcaatcgaggcaaaaattggcgtgattgccgacgcccttggtaagcagagcgaaggtaacgccctgcgccagaaggttcatcagcagatcgcgcaaattccgtcgcagcccgtgaacaagcgggtgctgtttattctcagccacggcggcatgaataccatggtggccgggaaacaaaccgcggcggatggcgcaatcagggcggccgggctgcaaaatgccatgcagagcttcgaccattatcgcagcatgtcgcaggagggcgttatcgccagtacgccggacctggtggtgatctccgccgatgggctgaaaggcatgggcggcgaagccgggctctggaagctaccggggctggcgcagacgcctgcgggacgccataagcaggtactggtgatagatgatatggccctgctcggctttggtccgcgcaccccgcaggcggtgctcgcgctgcggcaaaaagcggagcagctgccctgatgcgctcccaccctgcccgtcatctgtggttaatgacgctgctgctgattgtcctgacgctgttagccacgaccctgggcgccatgcgtctgccgttggccagcctgctgccctccggcgatgagattctgagaaacatctggctgaccattcgtttgccgcgagtgctgctggcgctgctggtcggcgccgcgctggcgctctccggctgcgtgatgcaggggctgtttcgcaaccccctcgccgatccggggctgttagggatcagcggcggcgcggcgctggcggtcgcctgctggctggtgctgcctctgtcggtgccgctgctcgtggcgctgtacgccccgatgctggcggcgtttatcggcagcatggcggtgatggtggtgatttttatcctcagccgggcgggagacgcctcgctttcgcgcctgctgctggtcggcatcgccattaacgccctgtgcggcgcgctggtcggggtactggcgtggatcagcaacgatacccagctgcgccagctttcgctttgggggatgggtagcctcgggcaggcggaatggtcgacgctgctggtggcggccacgctgatgatcccggcctctctcgtggtgtgggcgatggcttcacggcttaacctgctgcagctgggcgatgaagaggcgcactacctcggcgtcaacgttcgcgccctgcagcggctactgctgctgtgcagcgcattgctggtggcgtcggcggtggctatcagcggcattatcggctttatcggtctggtcgtgccgcatttgatgcggatgtggctggggccggaccatcgcggcctggtccccggttcgctgctgtgcggcgcgatgttactgctgctggccgacacgctggcgcgtaccgttgccgcccccgccgagatgccggtcgggctgttgaccagcgtactcggcgcgccgtggtttctgtggctgatttttcgtcgggagaaagggacccatggataaccgctatagcgcgcgttcgctgtcgctgcgtctgggtaaccggcagattattcatgatgtttcgctccagctctgcggcggtgggacgacggcattgattggccccaacggcgccggtaaatcaaccctgctgcgcctgttaaccggttatttaacgcccgacggtggcgaacgggtggtggaaggccgtccgctggagagctggtcggcagaaacgctttcccgccggcgggcggtgatgctgcagcgtacccagcttcacgccgactggccggttgagacggttatcgccatgggccgttcgccgtggggcggcgtagcaaatgaggagatgatccgccgggtgatggaagagaccggctgcgatcatctggccgggagacgctacccttccctctccggcggcgaacagcagcgggtgcagctggcccgctgtctggcacagctgtggcgcgatggcgcccccgagggctggctgtttctcgatgagcccacttcggcgctggatctctattaccagcagcacctgctgcgcctgctcaaacgcctgacccgcagcagccggctgcacgtctgtatagtgctgcacgacctgaacctcgcggcgctgtgggccgaccggattctgctgctgtatcaggggaagctggtagccgagggcacgccgcaggaggtgatccagcagccgattatcagccgctggtacggcgcggaggtcagcatgggggaacatcccgatgcggccgttccgcaggtctatctggcgccgtgaactgatagcagtgttgcgccagaatagcccgctgccagccaataatcctttcccggctcgcgctgcgcttagtcgggctataattcgtgcggtatgtagcccggcgaaggcgtcagccgcgcccggaggactccataagggcgcacgttgtcagtaaggcattgacgtccgttccgttcgtgattagccggttacggtcttgaagccgtgccatccggcgtccgcgccatcgtccatgacggaatgccaccttcgcacggatacttcgccgctttggcctcatcaaggtcaattcccagacccggtttattatttaggtaggcataaccgtggtctatctccgggcatcccgggaagacatcgcgcaaggcatcattcatcggcgtgtactcctgaataccgaagttgggcgagctaagatcaaggtgcatgttcgcgcaaaccccaaccggtgagatatcaccaggcccatgccatgcggtgcgcacaccgttaaactcgctatacaccgccagtttcttagctggcgtaatcccgccgatagtgctgacgtggcagcggatataatcgatcagcttattgtcgattaagggtttccactcattcacattcacaaacagctcccccatagagatcggcgtggaggcctgctggcggagcattttaagccagtcgatattttccggggcgacaggatcttcaaggtagaagagctgatattgttcaagcgttttggcgagatgaattgcggttaccggcgtcacgcgctcatgcacgtcatgaatgaactcaacaccgaatcccagcttgttgcgcagatggtcaaacaggcgaggaacgcttttagcataagcgtccgggtcaaaatagattcccggcgttttgctgcgcggggaacgcttcggttggatatttttcgcccgcgccagttgggtcgcaatgagcttaagatcgtcggtacccgcgccgccgtacatccccatctgacagcgtacgtactggtatccctcttccattctggcgcggatattgtcctcgacttcaacttcgtccccgccatcggtatggcaatacagcggaatgccgtcgcggcatttaccgcctaacaaatcatacaccggcatgcccgccagcttacctttaatatcccacagcgccatatccacaccggatagcgcgttgttcataatcggtccgctgcgccagtagccgctgaccgcgccagactgccagatatcttcaattcgcgtgggatctttgccaatgagaaaaggcgccatgtattcatctatagcgcttttcacggcgaagattcgctgggtaaacgtcgcacagcccaagccatacaggcctggctcgttggtttcgaccttcacaaccgccagatcaatgccgccgggcgccgtcagaatcgttttcacgttggtgattttcaggttactcactttaactcctcagttcacagaattaactgcctgccatgctgtaagcgaatatcatcgccacatttgtaagttgtcctacaactttgcgttgttataacacgacgattagcggctcgtaacctcaatctttatttctgtgatcgcgatcatgccagcaaacaaaaaagattaaaaaaacaatatatacaataagttatataaaacacttcatttaaacaggagttgtgtttgtgatctatattgcaaatttatttttagcttattgcttttgcctcaccaaaaaatcaagcttaaataagacagtcgtcatacaagtaaaattaagcgaggaaataaaaatgagcgcattattcgatttaacgggaaaaacggctctggtcaccggttcggcgcgcggtctggggtttgcctatgcggaaggcctcgccgtggcaggcgccagagtgatactgaacgatattcgcgaaacgctgctggcagagtcggtcgatgtgttggcaagtaaaggctacagcgcgcacggcgcggcgttcgacgtcaccagcgaagatgcgattgagaaagcctttagcaaactggatgcacagggcattcacgtggatattttgataaacaacgctgggattcaataccgcaagccgatggtagagctggagctggaaaactggcaaaaagtgattgataccaacctgaccagcgcatttctggtctcgcgcgccgcggcaaaacgaatgatcgcccgccggtccggcggtaaaattgtcaatattggttcgctaaccagccaggctgcacggcctaccgtcgctccctacacggcggcaaaaggggggatcaaaatgctcacctgctccatggcggcggagtgggcacagttcaatatacagagcaacgccattggtccagggtatattttgaccgatatgaataccgcccttatcgaagataagcagtttgatagctgggtgaaaaacagcaacccatcgcagcgctggggccgcccggaagaattgattggtactgcggttttcttgtcctcgaaagcctcagattatatcaacggacagattatttacgtcgacggcggctggttggcggttctgtaatatcgcggtgcattcagcatttttgcctttaaaattttcggcgtgcctgaatatttactatacgggtctgccgatatcacacaggtataattatgaaggcttcaagatcacgactctttattctcacattgttatttattgtcaccgctattaactatatggatcgcgccaatcttgcagtcgcaggctcaaatatccaggatgactttagtttaacaccgacgcagctcggtttacttttttctatgttcacctgggcatatgcagctagccagatccccgtaggctatattcttgacagaataggctcccgcattctgtacggtggcgctattattttatggagcgtatttacttttatgatgggcttttcgtcccaccatcttttctcgacagcgacggcatccttcgtcatgctattagcttgccgggcgttaattggtgtcgccgaagcaccgtcattcccctctaatacaaaaattattgctacctggtttccggatcatgaacgagcaagagctaccgccatatactccagcgcacaatatattggtctggctctactgactccagcgttgtcttttatcgtcgccaattatggttgggaaatgtcattctatttatccggcggcgcgggaatactgtttggcatatactggctgatatattatcgcgacccgcagcacagcactacggtgaatcaggcagagcttgattacatcaaggctggaggcggctatggctcagagaaccaatccgccgtcagtacaaaaattggctggcaggatattaaattcttcctctgccggaagaccgtctggggcctgttcattacgcagtttgcctgttcctcaacgctctatttttttctcacctggtttattgtttatctggaaaaagggctgcacctttccatatcaaaagcaggggttggtgccatgctaccttatattatggcaatgtttggagtgctatgcggtggcacactcagtgatttactgctgaaaaaaggaaaatccagaacttttgcccgtaaattaccagtaatggctggtttattagttacaatgattattgctttagttaacttttttgaagaccagccgattattgctattgtgatactttccattgcttttttcgccaatgccttttcaaatttaggctgggtagtgtggagcgatgtcattccgcgaaatttcctcggaaccatgggcggttttttaaatatatgcggaaatctttccgggatcgtcagcccgattgttatcgggatcattcttgagcgcactcaaaatttccaatatgccatgtggtatatcgccgccgtcgccggactgggtctgctggcctatatctttctggtaggtaaaatagaagttattttacccggagaggctaatccagatagccgcgataataacgcattgcacccggcaacaaataataaatcctgaggtaattatgaacactgagaaaataacctgtaacgcctgtctggcacatgctgaaaaagacgtgcggtttgcaacacgcgatattgaatacggcaagcatgatgtgttggttaaagtggcctacggcgggatctgcggttcagacattcactattatcaacatggtcgcgcgggtatgtcgattttgaaacaccccatggtcatcggccatgaatttgttggcgtggtggaaaaatgtccggcagagagcggtttaaaggttggtcaaaccgttgctatcaacccctcttgcccgtgtaaccaatgtgagatgtgtctttcgggcaaacaaaacatgtgtagctcaatgcgctttatgggaagcgcgcagtttaacccgcacgtgaatggcggcttttctgaatacgtagcggttaagccggaacaatgtattgcatacgatagtcgggtgccggccaacgtcatggctttttccgaacctctggccgttgccattcacgcggtgaaaatggcaggccagttaattggaaaacgtgtactggtgattggggcaggccctatcggctgcctgattctggcagcggccaaaagcgcaggcgcctctgatgtggtggcctgcgatttaagcccgcggtgtctggaactggcgcaacagatgggcgccactgcagtgatggatcctcgggatgaaaagcgcagcgcgtattatcagcaaaacagaggctacttcgacatagtcttcgaagcctccggcgcacctgcggcgatagcatcaacggtggatttcacccgcccaaccggaacgattgtacaagtgggtatgggcgtaagcccgataacctggccggtctctgccatgctggtcaaagaaattaatctggtaggctcgttccggtttattgacgaatttactatcgcagtgcgctggcttgaagatggccgcattaatccgcgcccgctaattagcgccgaattctcccctgccagcattgaacaggcattgataaccgcggcggacaaaaatatctcagctaaggtcctcattcgctttgaataaccgcgacaagcgcccggtcgggcgctttgttcttaaaagtgaatgttatacaatgctgcaattctcagcactctaccggacagcgatcttgagcataaaatccattcaaaaacagaacgttgtaaatgaaatttatgatcagatcagcgcaaagctgctggatgggagctggccgccgggtagccgccttccgtctgaagcggagctgaccgcttcctttaacgttagcagggtcagcgtgcgcagcgctgtccagcgctttcgcgatctcggcatcgtcgtcactcgtcaggggagcggtagctacgtaagcgatcactttacgccgcagatgctgagcaacgatcctcgtcccatcatgcatcttagccgcgaagagtttcacgatatgatgatcttccgccagaccgtggagttcaaatgcgtggagctggccgttactcatgccacggaagaggacattcttgagctcgaacaggcgctcaacaatatgctgattaacaaaggcgactacaaaaagtattcggaggcagactacgctttccatctggctatcgtcagggcctcacacaacagcgtcttttataacgtaatgaattcaataaaagatatttattactattatcttgaggagctgaatcgcgcgctcggtatcacccttgagagcgtagaagcccatatcaaagtctacatgtcgataaaaaatcgcgatgccagtacagcagtgaaagtacttaacgaagccatgtcggagaacgttaccgccattgataaaattaagtcttcaaccagcagcaacaattgattaatcgccctcccctcttattacaactttccgttgccggtatcgctaccgacaacggcggttttatagtgcgttagaaaattgcccgatacagcgctttaatctcttccagattagtgtcacgcgggttgccgccggtgcacacatccgccagagccgccgccgcaagggcatcaatatcctcttctttcataccgacatcgcgcaggcgcgccgggatattgacgtcgcgattcagctgcgccaccgcctcaatggctgcctgacgcgcttcggcaatcggcagggttgacgcctgcttgttgccgagggccaccgcgatgtcgcgatatttttcgccagtatattcggcgttgtaggccatgatatgcggcagcagcaccgcgttagccacgccgtgcggcgtaccgtagaatgcgcccagcgggtgggccataccgtggaccagccccagaccaacgtttgagaagcccattccggcaatatactgccccagcgccatcccttccgcgccctgcgcctcgccctgaacggaagcacgcagcgaccggccaatcacctcgatagccttcagatgcagcatgtcggtgagttcccatgcgcctttggtgatgtagccttcaatcgcatgggttagcgcgtcgacgccggtcgccgccttcaggctggccggcatgctgctcatcatgtcggcatcgatgatcgccactaccgggatatcgtgcgggtcgtagcaaacaaatttgcgccgattctgtacgtcggtaatcacgtagttgatggtgacttcggctgccgtaccggcggtggttgggatggcaatcatcggcacggcggcgtttttcgtctccgccccgccttcaagactgcggacgtcggcgaactccgggttattaatgatgatgcctatcgccttacaggtatcctgcggtgagccgccgccgatagcgatcaggtagtcggcgcccgactgtttaaacgtctctacgccctgctgcacaacctcaatcgtggggttcgggaccacttcatcaaaaatgctgtaaggcagcccggcttcgtcgagaatagcaaaaacttttgtggcgacgttaaaacgaatcagatccttatccgtgaccaccagcgcttttttgaagccgcgttttttaacttcatcaacgatacagcgaatcgaacctgggccaaaatacgaggtttcgtttaaaatcattctgtaagccatttgtgctccctcaattcgagtgtttgataaccataatatttagccctacagtaacgtgactggcgcagccattttattaattcatatcaattaacaccctaattgcccggcacgctgttgcagttaattaacccatcgcacattagtcatgagatctgtccagcatactggacatcagcgagcatcaactttaatgacgcccagggacaccaacagtaatatatacccgtcatacttcaagttgcttatgtgctggctacgctcattccccccagtcacatagttatctatgctcctggggactcactcccttgccgcctttaagcaactcgaattatttagggtatagacctgagaaagatattatctcatgatggatattattgaactggatcacattattttatcttttactgccgatacgcattcgtatagccaaaaaggtatctctgcagaagcacaacagaaacaggagggactcatgacgcttaagccggcgcacgttagaaactgccttcgattattctctatacctctttcttatccgtctccttatctcgccgcccgccaacatcaagtgcatcagatggtcatatcgtcgacttaacactttagaaacaaaagcatcatttcctcaacaaagcggccatcccaggccgttggctatcgattaaaaacctctaataagaattatctgtcattattcataattgcttatcggcctgtcgatagcaaaacatctttttcttaagagtcgcgagctctcattattaagaatattctctatcatttgcgagatattaattgttaaaaatctaaaaacataaaaaaaacagtcaagatctctatctttattgcaaacaacattacctcttgttaatatggcccttgacatatattatttattataaaaataccatttatgatgcttattaatttttattctaatcacctgaccatacttctccaacggcagcagtaaatgtctgactttataaattgacatttcgcacttgtccgctaactcacgagtaagtaacccttcaggttcatgttcttttaatacataaagaatatactcctgctctggtacgattaccccggcgaatttattgatgcccattgaattcatcaacactcgtaaattctcaactgcggttacagaattttgatgcgaatgcggtgtacaggacgaaaatgaaatcttcatgagtcagctccttctgtcattaagtacacggcagtatggattgaccctacgaaaacggcaacattagctttaaatttcaacttaaacagtacatttatctgaaattcacttttttttatgataaaaaccctgatataaagagtgaatttttaattccgtgcggagataaaaatgcggttcgatatagagggatttattacatttgatactgaggaagcatccctggtcaatctgttgactggtgattgtattgaactctctgctacttccactcgcctcctgaccaatctgttacaataccgtggggatattatctctcgcgttgacatttttcagtcggtgtttgaaaaatatggcgccagaccttctaatagcaacctgaatcaatacatctcaacgctgcgtcgcagccttgcggatctgggcgttgagaaaaatgtgattattacggtaccgcgaattggctttaaaatttctgaggaagtcattatcaccagcgacaatgattactcctcctctttcactctcccgacgctggccccagaacttcccagacgtagtttgctgtggcaacaccgcaaagtcgccattttatttatcccgttggtgatagctttgatgctgctttcacagttttttacccatcaaaaacagtcccctacagcgatttttactcaggataaatgtattttttatggcgcaggagcgctacgcgcgggggaaatactaagaaataaaaagctgttcccctcggggctcgattgttctacacccaagaaaatttatcttttcaaccgacaattaaatcaggaacaggacttaggtatttatatggatatattcatactcaaatgcgatatgaagtaccagcagtgccacagttactactataaggaaataaaaaatgcgtaaatacgcttttatcgcgctggcctgtacgctaacgctggcattagcttccatcctgtacatttgtttcaacagccatgacgctttctcctgtaaatcacaatacgatcttacagaggaaataaatgagaatgttctccgctcccagggcttgctatccgctgagttttccaaccatcatcttataatcaaccttgagggattgctcaccagcgcgggagataaatacattgtctcgcgcaccctctccatcacattaaaaaaaaagcgccgctgcagagcatcttttttatattgctgattcgcaaaccactcgccacaacggtgataatacgcctgataacatcgcgcaaaaaatcctctttgacaaccaaactaatgatagaatcatctatatcaatcgcgttaatgatgatactattttattcggtaaccaaacgttcccacaatatggttgccagcgtcaaaaaaacaatcattgattgagattcatctcattaattttaattacaaagatatcatgacgatacatttactaccgacgttagccagcatcgctaatatcattgatatgattaacccacggctaaatctgcaccatgtcagaacggcgtttatcgcatcgcatctggcaaatttagtcaatttttctgcggcccagcggcgtaaaaccattctcgccgctcttattcatgatgtcggcggattaaatgaaaagtcgcgccttgagccgctcaactacatcgataatgaacataataatcacgcgctaatcggcagcgagttgcttagccgaattccgctgtttcgcccgctcaacagaatcgttcgctatcatcacacccgctggcgcaacggtctggggcgttatattgaaggtgagcgggtacccgaagagagccatctgctcttcttcgctgaccggctggatgtactttattgcgagcaccgtaccgaccatagcgcctttttaagcaacaagctggtcgacatcgttgctgccggagctaatattttttataaacaggagtatattcaggccttcagaacgctctccgccgatgaccatttctggtctgtcatggcatccaccgactatcgcgattacattaacgcgatctccggcgttcataacgacaccctctctttacacaacctccgcgatattgctgagctggtctcttttattatcgatcaattcagtcagcagacgccctggcactccgccgccgtcgggcacattgccggttatctggcgacaaaaatagaaatgagcgcgacgcaagcgctgaaagtagaaattggcgggttactgcataatatttcctgtctggatcatagcccgccgtcaaaacgcgttggtgcgtcagacaacgcccggcacacgctttatcctattgaaggtattgatgatatttctgagtggatggccatgcaaaatggccccgcgccgcttcaattacccgaggaaatccttacgccagaagccgtgcttatcgcggtgagccgacgggtggtccatgcgctaaatagaccgaaagcggaagagaagtcgctggcgcagttaataaaaaataacccgggagaggaaattcccccgtttatgttatccctgattgcccaatattccccacaaattatccaggtctatcgtgcaaccgctggcgaaatacaggcgttaatgaatcgcattgcgcaactcacacattccctttagaggctaacccggcctaatcacagactcaggcgctcaatccgccgtccagaaccagggtttgcccggtcatatactggctcccctcaccgattaaaaacgccaccgcctgcagcacatcatccgtttcgcccaatcggcgtagcggtatcgcctggcgcatctcttttaatttttgcgcgggtatctcttccagcatctccgtacggatcaggcccggcgccaggcagttaacccgaatgccgaaacgcccgacctccagcgccagcgagcgcgcaataccgctcatcgccgctttactcgcggcgtacgccgtctgccccacgttgccctttaacgcgctgaccgacgacatcatcacgatggagccccgccgctgcgtaagcatcgccggcagcagcacccggttccagttcatcatcgcgatcacattggtgtccaacacttcgcgccagagcgcggcgtcctgatgaatatgcaggccatcgcgagctatcccggcattgtgaataatcgcttccggtgccccccgctcggccagtagcgcctgcgcaagccgttcaacccgcgacgcgtcgttgccgtcgcagacgtatccctgcacccggtgggcggagttttcgctcgccgcccgggtggcgttaatcgcagcctcatcgcggccggtaaagaccacgttccggctttgcgccaggccggtgaccagcgcccggccgataccgcggctgccgccggtcactaatatccattgttgcgtcatatcagttacctgactctttgctgatgtgctgacacagttcgcccagggtgatccccggattgtgaataaaccagtccgcctccagggtgatattgaattcacgttttgccagcaccatgagctcgacgtagtccaggctatctaatttcagtcgaaccagcggcgtattctcatcaatctcatccggttccaggtctttcgcatcgcaaatcatttcacatactttttgcagaacttcatcataggcagtcataaattatccttaattatcaattaggcacggggccaacttttagcgtgaccacgttggttattatcaggttatccagctgcgccgccgcggcgatgcgcaccagcgccccctgttcgacctggcccaccaccagcgagggcagcagccagagcgccagagattcgggccaaatcggcgtcgctttgcccgcgagacgagcatcaaacaccacctcctggtgggtttgcagcaccggatagcgggtaaatatttgctgcaacgaggtttcccccggcccgagcagggaggcgatgttctcctggcgcagcagcgcgggatcgccaatcagctggcggaacagcaaggcgtcaagaaactgccactgcgccaggtcgggccaggcggcatggaagcacgactgcagctcgcgcagcgtctttggcgcaatcgtgcagggctgtttacccaccagcgattccggcccggccgccgtgctcatctggcaggagaggcagagttcgccattgtgcggattgctgaccgaagtggcggacaaaaggcgatttttggctaccccgggcgttaacagccagtcggtatcgcaccatattggcctgcgcaggcgaacctggcattttacgtaacgctcagggcggtacagccgggagtgggcatcgcgcttcacgtcgagcagcgcgcgcattccgtggacgctcagctgtcccgcgcccatctcgcgcgctgccgcgaggtcgaagtgaatcgggttttcgtcgccggaaaacgccgcccactgccgcgcgtcggcaagggtgtagtgcagcagcgtcacgcgtgtttctccagcaccagcgcggcgttcgcgccgccgaaaccaaagctcagattcagcgcccgatgtatctccccctgacggtgcccttcggcgatatagtcaagatcgcactgcgggtcaggctgggttaaatgggccgtcgcgggcaggatccccgccgccatcgcctgcaggcaaacaatggtctcgaagctccctgcggcggcaatcagatgcccggagtaggctttggtgctggaaatcgggatgcggtacgcctcgtcgcccagcgcctttttcagcgactgcgtttcgttgagatcgttgagcggcgtggaggtgccgtgggcgttgatgtaatcgaggtcggcaggctggagatctgcgccgcgcagcgcccaacggatggtctgctcgcgggctacgcagtcctccgccggggaggtaaaatccaccgcgtcggagaaattagcatagccggtgacctccgccaggatcgtcgccccgcgcgcgagggcgctctcgcgctcctccaggcacagcaccgccccgccttccgaaagcacgaacccgctgcgctgcaggctgaacggacagctggcccgctccggcgactccgtttcccggctcagcgcgccgagcacatcgatattccagatcgcgcaaacgctgtttagcgattccccggcgccggcgagcagcatgctggcgcggccaaagcgaatcgcatcataggcctcgccgacagcaatagtgccggtggcgcaggccgcgaccggggtattttgatagccgcgcaaattccacagctggctacaggcggcggtgctcacgttgggcatggaaaaaaagcagctaaagggcgaggagacgccggttttctcaaactcgggtaccgccagatagctttcatccagccctgcccagccggagccgatgatggcgccgcacattagcgggtcataaaacgccgtgggagcttcacccgcaaaggccatcgccaccgcttcccgcgcggcggccagcgccaggcgcgcgtgacgtggcagacgccgacgaatcgcggcgggaacccccttaaggctgggttcattcgccacctgaccgataaaatgcgtgtgaataccgttcgcggagagatccacatagcggtagccgcgtcgataatccatgatggcctgccagctttcggcggcgctatcgccgaggggagtcaccgcgccatagccggttatcaccacgcgataaggggagttactgtgactcattctgggaagtcctctgttgcgggttaatgcctccctgcgccagccaaagctgcaaagtggcataaagatagtcgtactggttctgcgccaggctgttctgcacatcaagcagcgcgtcctgggcgttcagcagagtctgataatccacagctcctgagcggtagcggctcccggtgagcgccagacgctgctcgcccagctgcagcgtttgcagcagacgatcgcgctgctcgtcggcgttaagccgcttctccatcgcgttgtccacctccgacagcgcggtataggcggtgcggcgaaagttcaccgcctcctgctgtaccttcacgctggcctgctccacggtgagctgtaccgtgttccactggataaagggcgcggaaacgctgctgcccacggtgcgcagcgggtcgttaaaccactggtgaaagagctggcttccggcgcttagcgttccctgcagcgagagcgtgggatagaaactcagccgcgcggcgtctgagcccgccagcgccgcccgcaggcgggattccgccgcctgcaggtccggccggctggcgagcgcggccagcggcgtggcgttggcaatggcgatatgctgacgcacatccagcgcggaggactcatcggtgtgctgggccggcggtctgttgagcagcagcgccagcgcgttacgggaaatcgcccgttgctgcttcaggctcagcagctgattctgccggctgatgaccgtctgtcgcgcctgcagcacatcaagcagtcccactttccccgctcgctgccaggactcaatctgcgccagcgtctgcctggcgatatccagactcgccgcctgatacgtcatttgctggttcagcagagcgatgttccagtacagctgcgcggtggtgtcaatcgtcgacaggatcgtcgcccggtagtcctgctcgctggctatcgcctcccattcgctctgctcccggatccgcgccagcttgccccacagatccagttcatagctcagggacagtgaggcgctgtagctctcctgcgaaccgccgctgttgagcggttttgagttactgccggagccgttgaggctcgcgtcggggctgatattggtccgggtgagcccagcggaaatacgcgcctgcttaagggttaaggcggcagcggcaagatcgttattgctttccagcacctgccccaccacccgcgacagacgttcgtcgccgaaacggtcccaccagcgctgcgttttctcctgcgagcgcgcgatgctgtctccctccgtccgctgccagttctccggcaccgacagcagcgggcgctgataatcgctgcgggttaaattcccgcagcccgtcagcaatacaattaacggtaataaagtcagcggtctcattcgcgggccagcgcctccgtcgggttcagtcgcgccgcgcggcgcgctggaaaatagccaaacgtcaggccaatcagggcggaaaaaccgcaggccatcgctaccggcagccaggtgaagaccatggaaaactcctgcgtcagcagggcaaacaggttaccggcggcccaggagcccaatacccccgtcagcccgccgagcgcgcagatcatcaccgcctcaattaagaattgatgcatgatgtcgctggggcgagcgccgaccgaaagccggatgccaatctcatgggtgcgttcggtaacggaaaccagcatgatgttcatgacgccaacgccgccaaccagaagcgagatggcggcaatcgcggtgatcagcagcgacatggagtcagaggttttttgcagcgcgttggcgagctgttcgtcggtctggacaaagaaatcttttttgccgtgctcgcggataagatgcctttccgcccgccgcgccgcgtcctgcggcgacagcgtttcctgaaagcgcagcgtgagcgcctccagcggtttgtccccggaaatccgctgcaacaaagaggtataggggatccaggccgacataaacccgctgaccaccttcggtcccggcttgctggcgatgccgatcacccgccacggcgcgccggcgatttgcacaattttacccagcggatcttcattaccgggaaacagcgtctctttgctggtttcatccagcaccagcaccggttcacgatcgtcgacatcgcggtgggtaaaaccgttgccgtgaagaaaacgaatgccctgcagcgagaaatagtcggcggaaaccccggaaagaataatcgaggaatcaaacccctggcgcaccgcggtcgtcatgctggagacgatcggcgacaccccaagcacccacgactgtttgccgaggctggcgatatcatccagcgacagcgcccgctccatatccggacgcttgctgccccagccggtgccggggcggatttcgagcgtggtattacccagcttgccaatctcgttcatgatgctctgccgggcgccttctcccaccgccatggaggaaaccacggacgaaatgccgatgataatccccagcatcgacaaaaaggcgcgcatacgatgccccagcagcgaccgccatgccatccgtaccgactctccgatactgcgcgacagcgaggcccggccgttatcctgtaccgcgggcagccgcggaatgccgcgattatcacgcgcgccgtgggtgctgtcggcgaccacctgcccatcgctgatctcgacgatcctctgggcctgctgcgctacctcgcgatcgtgggtcacgataatcaccgtatgcccgtcagcgttcagctggtgcagaacatccatcagcgcccggccgctgacgctatccagcgccccggtgggttcatcggcgagaataatctgcgcgccgttgatcagcgcccgacagacgctgacccgctgctgctggccgccggaaagctgcgcgggtttatgcgccaggcgcgcgtcaatgcccagcttttccgccagcagcgcaatgcgcgcctggcgctcagcggcgggcatcgcggtatagagcgcagggatggcaatattctcttccgccgtcaaataaggcatcaggtgatagcgctgaaaaataaatcccagccagcggctgcgcagctccgccagcgccgcgctgtcggcctgatgggtggcgatgccgttgatatacacttcaccgctgctgggtttatccagacaaccgataatattcatcagcgtcgatttacccgagccggaagcgcccataatcgccaccatctcgccgggcataatggtcagagagatggatttcagcaccggaatcagttgcgtcccggcaacaaaatgacgcgtgacgttgttcagcaagattaacggctcagccatcagacggaccccgcatcctgcgggatcaccacccgctcaccgggctgtaatccttcaagaacctgcgcatactggcggtcgttaatcccgatgcggatggtgcgctcctcgctgccgttctccttttgcaccacgaccaggtagcgctcatccccgagcgaacgccccagcgcggcaaccggcacgcgcagcgcatctttcacctgcgcgatgcggataaacacctgggcggtcatcgaggttttcagcaatcgctggcgattatccacctcgaaggtgccgttatagtaaatggcgctgctctgctggttaccggcagacgcgccggcgttttgttcctccagcgcctcctgcggcgcgggctggacatagccaagctccccttcataacgggtttgcgggtcggcaatgacgtaaaaccatagcggctgtcccggatggattttctggatatcggcttcggaaatacgggtttggacctggactttatcgagatcggcgagcaccagaatcgtaggcgcaatttgcgaggagacgatggtttgcccttcacgggtcacgatgcccagcacttcgccatccataggcgcgagaatgcgggtatagccgaggttggcgttggcggtctgcacgctcatttccgcctgcacaatctgcgcctcattcaccgctatctgctgaacctgcgcggcatactgcgcctgcgcctgttcgaggtcgctgctcacgccggagccgtcgcggctcatggcctgctcgcgcgccagcgctttacggtactgcaccagcgtggcctcagaggcctgcttttgcgctctggcgctggccagctgcgcggtagcgttgcgtaagtcggaaagctgcagcgtcgggtcgatttcggctaacagctgccctttgcgcacccgctcgccctggcgcacgtacagcttacgcagctggccgctgacctgcgcgccgacgctcacctggacggcaggtttgataatcccgctcgccagcacgaccttttcgatatccccgcgatcgagcgtaacggtatcaatcgactcggcctgtgccggaaatgagcgctgataatagacggcggcaacaatggccagcatagcgaccagcgcaaacagccacgttttacggcggcgtaaaaatgctcttctcattgctccacctctccctgtgtgatatcgcgcagcttgccttccttcaggcgataaacccgcgtgaagtgatgcaggatctgctcgctgtgggtcacgacgatcagcgtcttgccctgttcgcggcagtactggcacagcgcgaggatcgccgtttccgcggtttcatcatcaagattggcggtcggttcgtcgaacagcagtatgggccgggtgctgtagagcgcccgcgccagcatcagccgctgacgctggcctaaagagagcgccgagtggctctcgcggatcagcgcttccattcctcccggcagcgcctgaaccaccggccccagcgccattttttcgaccagcgcctccactcgcccgcgatcgctgtcgctgtaccacgggtcaaacagggtgatgttttgcagcaccgaggcgttgaacaggatgtcttcctgactctgtagccatacctgcgacgccagctgctgcgcgctcacctcgtcgttgttcagcaaaattcgcccatgctgcgcggaaaaaagccctgccatcagccgcagcagggtgctttttccggcgccggaatcacccacgatcgccagccgatcgccgggctccaggatgagatcaacggcattgagtaccggacgctgcgggttgtaatgaaagctcacctgctcgaacgtcagccgcggaaccgcttcaccgctgagcggagcaaactggggcgcagcaggctcatggcgggtgaacaggccctgcgcgcgggtatcgatcacgtgcagctgtgatttacggatcacggcataaaatatccgcgtgacgtaggaggtaaaaatctgtcgtaaaaagctgtaggcaaaaaagtcgcccagcgagataagctttgcgtgcaccagcggcagcaccaccagcataaaaaccaccatctcaaggctgccggtcagctggtacagtccctctttgacctgctgataaactttctgccgctggaggcaggtgaaaaggtcatgagacagacgggcaaactgcgctttacgctgcgtttccagcccggcggtcttgatggttaacacgccctgaagcgtttccataaaaaagtcattcagcgtcgcgcttttcagctgcagctgctgcgtataccagcggtcgcgaaaaatggcccagacgctaatcagccccatcgccacaatacccacggcggaaatcagcgccagcaccggggagatccagaacataatgccgatcgcgataacgcagatgatccagtccgagcggagcccgttatccagttcgattttttgcagcatcccgccctgccaggcgataaaacggctgaaaacgtcccccggcgcgcgtttttcaaaaaaacgcagcggattattcagcaggcgggaaaaaccgatatcgcttttaagcaggacaaagcggcgaataaatcgctcgctaatcaccctgacgcccagcgccagcagcgtggatacaacaaaggcgaggatgaaccataaataaggaaactgcgtattctgaacgtcagagaaggcctggttgatcgcccggctgaccatcgtcggcattaaaaacagggtgagcgacaccaggaaggtcaagagcatcagcttataaatgcccggaaccgccgcggtctccttcaggctcatcgtccgcggcatctcctgctgcgcgccggcaataaccgggtccgggccggcaatcgcgccgggcgactcttcaaggatcagcgcatagccgctaatctctttttttaatgccgagaaaggcagccactgctggccaatcgccggattcatgacgcagacgtaatccccttttcgccaggccagcagaacatagtggctggcgccgtagtgcaaaatggacgggaacggcagcgcatgaagctcagcgtgatcgaacaataccggcgcggtggcaatgccgagctgctgcagaataacggataaatcgctcaacgatgtcccatgatcggatgccgggaaaatttcccgcaaagccggcagcgagcacggaatattctgggtttgcgccagcatcgcaatacaggagaggccgcattcattggtctcttcctggaaaaccatatcaggaataatctttttcatgatgatgcatcagtgattaataaaatagagcgaatggctgtgccacaaaagccaatcctgcggatagtcacgcagggtgttttcaatcatcgtcggtagctttgccgcgacctcttttggcctcagcggagaatagatctttatttttatcccgtgctgataatagaggtgataaaaaaccacctgcgccgatacgatgcgagaaaaccgctgtaccccgctatgtaattttgccgggcggccaaatatccggcagcttattttcccggactgcgcttccggggtctgcacggtgtaatcggcaggaatgtcggggaaaataatcatattttcccgccctgccgatacattggtcattaacgccataagctcgctagccagcgatgtattatcctggtggattgagcaataagagagcgcgacgccgcccatttttcggctggcgacggtgtagctttccgcgctggaagagaccactacgctggctttgcccggcgtcacgccagccccgaccatcgccgctaagatatcggaaacgcagtgcagcggcgcaaggacgaccggcgtcttttgcgccgccaggggagcgacaacggcgtcaagctctcgcgtgcatgcctgcatctgggccaggatggccgggtgctgtccccaggtcgcccctgtctccagcagctggcgacgcatggctatccatccggcatcaattcggccctcgacgcccgtcaggcagcggtagttttgcgtcgccacggcgctgcggccacggtactgtctgcccagcagccgcagccgacacagcgcgcgaaccgccagcagcagcagcggcatcggggtaaaacgcatgactctacgcaccgctttttggccgtagccggtaagaggccggtagcgccagctcagctgcgcggaccattttcttacgctgaagacgctccagacgatgagaaagcgcgccacgcttactccttatcctgggttaacagctggcgcaaatagtcggcaaattcaggaaactgacgatccttcgccactacgtattttttattgacaataaacagcggcgtcgcgttaatgtcataaagttcggtgattttcgccatatattccagacgctcggcgacggcctgactttggcgtagctgatggtatttatcgacatcaatactattctttttcagccagccattaagcgcttcctcatcggctaaattaatcccgcgggtcattaccgcgttaaatgcctggtcgcgcgtctggcgctcaatacccatgacttcaagggtcgcaaaaaccggcgcaaagaccgccaggccgttattctcgccagtaatatggataacttcaaaggtgctatccgcgggtagcgtggcggcgaatttttcgatctcttcctcgttcgatgcgcagtagtgacagccataggacatcacttcaataatgcttttctcatgttttattgggctactggcaacggttgcgctgtcaatttcccgcagggcggaaggctgactgctatccagtgaaaatgtattaaacacaaatatgtgatagcacagcacggtaattagcgacgaaattaacgccaccagaaacgtatagccaacggcggtaataggttttatcttcatttgataccaggctcgcgaaaatagcggagaaatacatggagggttccccctccatgtatcacatcagtgattaataacgggcgctatttggcacgacgcacatgctgtccggcgcatctttcatgctaacggttgaaccgtgcttatccgtacaggtggtcacttgtttacaggtagaaacaccgccaacgaccactgtctcgtaagagcttgtgcaagtttccttgcagcagccgccaataatagttgacgcttcaatcatacttaatttttgcatttgttagatccttaactatttatattgaaatgtatttttcttacacttacctactggcttagctatctgccagtaattctgtcgatgttagactttgtatgctgttatacgcagggggtggcgacgatacatttgaaaatattaaacagctctacgttatttttagcgtttaactttttcatcaggccccgtttgcagcggctcagtcgacgaacatcaattttttgctcagaggaaatttgcgacaatgacttccctttgaatatttcttccattaaccaccagtcatcgctggagatactgttattaaaatcccgggctaaccacttctgtcgggtataattaatcagcgagcggctataaaatattttttttgccaccatcgaatcagcgccttcaatgaatttaaaaaagttctccagcgactcattttttaataaccagctcgcctccgggagcagcgaatgcagcgcaaaaaacagagaaatattattttctcctaataaaatcaccagctgctgattttcccggcagtagtactctttaatggtgtatagcgcattaaagcgttcgtccggcaaactgtcgacatcgcagagcacccagcgcagctcctctttctgcttcggcagacgcagcgtattaatcagctgagagaactggtcgagccttgagaaagcgcagtcgccgtcatgcgcggcaagatcgtcaaccaaagaacgtacgccttctgagaaaaagatatttttatcgtagagaaagaaacggcggctcatttatcatcatccttgatctattctactggtaattaagggtgtaatacgctgttgcctggaaggcaccggtctgcaaggttttgttactcaaggcgtccggttccccttcaacaaaagctttaaaatttaactgcatggtggcatcggaaatggcgaccgcggttgttggcgtattgagtgaaatcgccgtgccgttactctcttcaaaaccaatgccaataccgctggcggaatttggcgctaccggcgtaatcgccagacggtcgctcatattggcattttccgtcccgctaaaggttacggtaacggaattaaaaacatcggtactgcaatccttaagctcaatcacaaacgctttgggctgtgatttgctctccgcatagagcgtacgggttgaaatctggccaaaatccacggcgatatttttggatgaaggaacgatactgcagccatgggccgcgacggtgcctttgaaggttaagtcgccgccgatcagttccccactggcgtacgccggcgtggccgccgacagtaagcccagaagtaccatagatgcgataaattgacgcatgctgcccccttactgaaactcagcgaccacggtggccgatgcctggaaatccccttcgagaacgttggtcccggcattggcaatcggcgcggcggtgagattccaggttccctgattattattaaaacccggcacgtcataaaatctattcgcggccactaaactgccgcctgaatctttcagaataatgccaagattggatcgatcgacggcgccggtggtccctaaataatcgctattaaaactggcagtattggcctgctgaatacccaggcgaatatttaaattaccgttcgcgaaacttcccccttcgcatttcacctgaataggcacggaccggctgtaattattgccatttagcagcgaacccgaactggggatggtatcaaaatcaacgacgatcggtgagcctgagttaacaatacatttatccggaacggtaatgaccccggaattaatcgagacaatcgacattggagtgctgcccattcctgagctatagttccccaggcggccgtaaagcttggcgatttctgtacccaacaggttaacgccgttgacaataggcttagtaatcataaacgttacccgccccttggcgccggactcaaagttattaaattgggtggttggcggaacgcatttattctgaaaagcgttattcgattcattataaaaaggcaccgcaaaataatccatgcgcttaccacggatataaatttcaatttttacatccatataatcattgagctttaaatagcccggcgcgcttccctgctgcatcagcgaggcggtcgcagagtaataaatcgcctgattttccataggaatggtacagctggctataccagaatattgcccacccaatgaaaattcataaggaatcgttgccccaatgctgttattggtaatatcctgattgaccacgtcaatattatacattttaggtccgccgaccggcgtaatttccccttcaatcgccgcgctggcgtcaagggataataagccgccgcagagtaaaagcgtgacgtaagattttcgcccgataaccatcgtcgtcatcagagatactccatttttaaacgtagcagtccgctaaagttgcccgcggtcacgtttcgtccggttgactccagcactgcaataaacgtcaggctgctatcgccggttttcacaataaacggcggctgcgtttgattaatatccagcgcccgctctttgacatccagcaggcgaataccggctcctgagatgctgccggtcaggcgcagcagctggcgattatgttcatccgattcgccgataaaagtgagctgaaccgcctgctcgccggtggtgtagagatgcttgctgctgcccgtcgtccgtgaggcgatgctgtcgcgcgcctgcgaggcgcctttcaggcaatctctgagttcgacgcgaaccagcaccggctggctccggtcgccggcctgatgaaaacggcgggcgctgatttcacccatctcaataatctgcaggcggctctgcggcgccagcacgcaaggcgaggcataaacggagccattgaatatcacgttaccgccatcttccccctgatgatcccggttatagtgctgtggctgtagcggaatatcagcgtcggccagcgctggcatactgataccgaatacaaacagtgctaatagcgatagacgcgttttcatcatcaggttcctctttaattacccttgctgctatggcggcagcgctttacaggtatttccttcacagcgatatttcagctccggatgaccgccataatcgttcacatacatcatggcgaaatctcgcacgccgccgtcggttacgctgaactccatgctggacttcggcgcaatcataatccccggaaacttagtgattttttcacccttaacgcgggacaagctaataatggtgatgtaatagggcgtcgggttttgcgcggtcatcttattgccgctcttttgaaagacgacctggtcctgccaaatctcgcttttgcttttgggaataatggccgtcgggcggtaaaataatttaatccgcgactgcatggctaactgcaggacattcgctttatccggcttgggcgggatttcgcgcacgcttaaataaaacaggctttcccgatcctgcggcagctggttaataccatcagttttggtgacccgcgccacccctttttgcccgccgttaatccgctgtaaaggcggcagcaccaccagcggagaggtaatcttgttgcccttgctgtcctcaacccacgattgcgcgaggaaaggaatatccgggctggtgttggttaaattcgcgctcgccgagctgtctttaccggttatgataagacgcgtgcgatccagcgaaacccctgcctgagcggtaccgcttaccgccgccagcatcacaacgcccatccagcagaatttgttgcttgttatgctcatttttggccttttattactgtcactgtcatttacacggcaatagcgcggctgtcgaacgacgcacgatggtcggcgggatggcaatctggcactgctttttcccgctccacactacgcttagcagctcctgaggattaacccccgccagccatccctggccaccttccataatcatggagacgctcacgccatcgccgttgataacctccgcgccgaacggtggataggtaccgtcagccaggcgaataatccccatcattttttcgcccttcgccatgccaaaggtctgatagccaatggcgccttcggtcagcgtggcagtgctgatggcctttgccggttcgatggattccgacatcgcatcgacatcaacgcgggtatcaaagctgttgtagctcacgatgtccggaataacggcaataccgaaattgttggttcttgatttaccgtcattgagcggaacgtcgccgataccgttggtattcaccatcacgcgcgccgtgttaagcgtcgcgccgctgttgtggatcgccgccccgtgccgggtagcggtaaagccgccgcgcagggtgctgctcagggaaacgtagtgatcctgctgatagctggcgttgctgttgatttcggcatactgcgagcggcgctgatagtagccgtcgacgttggcatagccgctctggctcgccccggcacgcagtcgccacaggttgttgtagtcgctgctgtcggtgtacgagagcatcgggctggttttgccgttattggtctgtacgtcgagaccgctccatttgctatcgccaacgggaatggaaagcgagaaagcaatagagtcgtctttacgcccttcgtaatcggaacggtaggccgaaatattggtggtgatcccgcgaatattaccgacgttaaacgagcgccctaacgagatgccgtagcgatcctggctgcttcgattccagtaattctggtgggtataggtcagaaagacggtggtcgctttgcctggctcatcggcccagaacgttttattcccggtgatggtatagacttctttttcacggccaaggctgtcgtaaccctcgtaacgctcgttgagatattgcgagaaagagcggaaatcttcctgagagaagcgatagccggcgaaggtaattgaactgttatattcgtcgaacgttttcgcatagctcagcttaaacgaggtgcctttaagccgcttctggtttgactgctggctgtaggattcggtggcgtccagcgagagcgcgcccagtacgctgagatcgcggccaataccggcggagaccgcggtatattccgcccctgcgctttgtaaaccaccgtacagcgaccaggcgttggttatcccccaggagaaatcaccggaagcgaaacctggcccctgaattttatggttatagcgggacggcgcgccgacagccacgttgtaacgcacgtagccgggacgcgtaaggtaaggaatgttggcggtgttaacctggaacgtcgaaatggaaccgtcctgctcctccacctgaacatccagcgtaccgcgcaccgaactgcgtaaatcctgaatgttaaacggcccggcgggaaccgtcgtttcataaataatgcgcccgctctgcttcaccgtcactttggcgttggtcttggccaggccgcgaatttccggcgcgtagccctgcaggtttggcggcagctgacgctcatcgctggcgagattaagcccggtaaagcgcacggtgtcgaagacctgagaatcaaggtagatctcccccgccgtcagctttgccgccatcatcggcagcggacggtaggcgtagatctgattcatgtcgaaatcaaattgatgcgtcgcgctgtaatagctggtctgatattcgccgcgcaaacgccagccgccgaggttaaacccggtctggccgtatccgctcagggtggtgtaatcttcatgcatatcaagctggcgggtatattgcccggtcagactgtagtcgagcaaaaacccacctatgccctggtcccagcgctccggcggcgtccagttcggatcgttgtatttcatccacgcctgcgggaccgtgatgtccagcaccccggcgtagttgctgagcgtagcgccaggaaggctcagcaggtcatagcaatcggcaaacggctgtgcgacctttttctgcgcttcttctttcaacgccaatctggcaagaatttcgccgttaatgcaggcctgggtatgcttctggtccttagaagccagatagcgaaccttttgctgccccaccgcctggccatttattttaatatctaataagtactcgcccggcgggacatagttgtcggtggcgaaacgggttaaatcgatattgtcgcgatcggcggcatccagtacgtcggtattgaattccacgtcggttgaggcacaagccatagaagcacagcagaaaaaaagcatctgagagaggattatttttatttttagttctgctgacatgactattcatcccgaatcattcagtaaaatatcgtgcgcggtaaacaagctacaacagcaatagctggcttgcgtctagttgtaatccatataaaaacgagtgacggcgtaaaaatccccagccttaatatgttgctgaaccggaaccagcgaagcggtgaatttcagcgtattattctcatcacttagcagatatcccgaagagggttctccaaaagttaaaacttccccacggcgatcgcgaatctgtataccaaacccctttccttccccatccggaattaatacggtcgggtcctgcgatgacgcattgccggtaaaagtaatcgtggcataagcaccgggcgttgattgattttcactgccgtaagacgcgcagcccactaagcgcaccagaaaaggccggacgagcttaccttcttgatccatattaatatcgcgagcggatatgttgccgaaatccacccatagctcccgcgagctgggatcaatatcgcaggcggcagcaaccagctcccccgaaagcgccagctgtccgggcgtaaaattagtactcgaagcatgtccggaaaagagtaataccgatacgaatagcgccatcagtctctttttctctgtatccttaaccatactcagaattccatattatcgggtacaccatccaatatcgcggggagaaacctccccgcgagcgataactcaaaatcgattattgataatcgatagtgaaattgatcgttgactggaatgcacccgcggttacggtagtggtagaaccgctcgctgccgcttccgctttcaggaaggccacgaaaggaatggtgttagtaccatcgaccagggtgaccggcgtggtctgcgcgccccaggtcacagtctggctagcgctatctttcaggccgatacctgcaccagatgcggtaccagaagtaaaggcagccagagtaggatcgttcgggttaaccgaagtcggggtataggaaacaacggcgctgctggcgatggtggtatcgcaatactgcagctcgatgtttttggtttcagttgcctgaccaccgccttgcagcagggaaactggaacctgaccaaaatcaacggttaccgggctggacgacggcgctaaaccacacgcggtattcaccagctcaccctgaagctcaatctgaccattagtggtatcagccagtgcagacattgagccgagagcagcagttaatgccacagccatagcaactttattcagtttcatagaaaattcctgcgttataaatttttatcctaaagagtaaggagctataaaattgctgagttatactctcataacaatttgcagccctccgcatcaccgaaaaatccgtttcaataattagactattaattaatattaataatttaattaaagccagatcccctggtcgacaaaaatactaacaaatcattttttaggtaaaaagagatacatttacaaaggaattaaaaaaagatttaacctcgcgaacaatgccaccataggaaattaactcgcagaatgctgagatatatcctaaaaacaaattacgaaaggtaattaatagaggataaacgaaagatgttgatggtaagagaattgtaacacagatcacattttattaacaaagccccttttctgctacacgcaacggtgaaaagtagacggaataagggaaataacgcgaggcgtacgacgccggtgaaaacggatgtctccccgtctataccatcgacctgcattcgccagtatagcctttttccgctgcgacctcctcctccggcataccgccgctgcttcttgttttcctgacctgaagactccgttatcatgcggctcatgagtcaataaacagaaatgcacagtttcacgggaaccgatgagcgatagcgcgacgtcatgaaaacaataaactccgctaactcattaaaacttcagaaaatggacagcaaaaactgatgagtacactagagaatcttgacgcccacaccccgatgatgcagcagtatctcaagctgaaagcccagcacccggagattctgctgttttaccggatgggtgatttttacgaactgttctatgacgatgcaaaacgcgcatcgcagctgctggatatctcgctgacgaagcgcggcgcttccgcgggcgaaccgattccgatggccgggatcccccatcacgcggttgagaactatctggctaagctggttaatcagggcgagtcggtggccatttgcgaacagattggcgatccggcaacgaccaaagggccggttgaacgcaaagtcgtccgcattgtgaccccgggtaccatcagcgatgaagcgctgctgcaggaacgccaggacaatctgctggccgccatctggcaggatagtaaaggttttggctacgccaccctcgatatcagctccggacgttttcgcctgagcgaacccgctgaccgcgaaacgatggcggcggagctccagcgcaccaaccccgccgagctgctgtacgcggaggattttgccgagtcgtcgctgattgagggccgccgcggcctgcgccgccgtccgctgtgggaatttgaaatcgacaccgcgcgccagcagctcaatctccagttcggtacgcgcgatctggttggtttcggcgttgaaaacgccccgcgcggcctgtgcgccgccggctgcctgctgcagtacgtcaaagacacccagcgcacgtcattgccgcatatccgctccatcacgatggagcgccagcaggacagcatcattatggatgcggccacccgccgcaatctggagatcacccagaacctggccggctgctttgataatacgctggcctcggtgctcgactgcaccgtgacccccatgggcagccgtatgcttaagcgctggctgcatatgccggcgcgcgacaccgccgtgctggtagagcgccagcagaccatcggcgcgctgcaggaacattacaccgagctgcagccggtactgcgccaggtcggcgacctcgaacgtattctggcgcgcctggcgcttcgcaccgcccgtcctcgcgatttagcgcgtatgcgtcacgctttccagcagctgccggcactgcgcgcgatgctgggggacgtcgactgtgcgccagtacagcggctccgggaaaagatgggggaatttagcgagctgcgcgaactgctggaacgggcgattatcgatgcgccgccggtactggttcgcgacggcggcgttatcgcccccggctataacgcggaactcgatgagtggcgcggcctggccgatggcgcgaccgattacctcgacagactggaagttcgcgagcgcgagcgcctggggctggacacgctgaaggtaggctacaatgccgtccacggctactacatccagattagccgcggtcagagccagcatgcgccgatccactacgtccgtcgccagaccctcaagaacgccgagcgctatattattcctgagctgaaggagtatgaagacaaagtgctgacctccaaagggaaggcgctggcgctggaaaagcagctgtacgatgaacttttcgatatgctgctgccgcatcttggcgacctgcagcagagcgccagcgcgctggcggagctcgatgtgctggtgaacctcgccgagcgcgcggagaccctcaactactgctgcccgacctttagcgataagccgggtattcgtatcagcgaaggccgccatccggtggttgagcaggttctgaaagagccgttcatcgctaacccgctgcacctcgccccgcagcggagaatgctgattatcaccggtccgaatatgggcggtaaaagtacctatatgcgtcagaccgcgctgatcgccctgctggcgtatatcggcagctacgttccggcggaaaaagtcgacatcggccccatcgatcgtattttcacccgcgtcggcgcggcggatgacctggccagcggccgctcaacctttatggtagagatgaccgaaaccgccaatattctgcataacgccaccgagcatagcctggtgctgatggatgaaatcggtcgtggcacctcgacctacgatggcctgtcgctggcgtgggcctgcgcggaaaatctggcgaacaagattaaggccctgaccctgtttgccacccactacttcgagctgacccagctgccggagaaaatggcaggcgtggccaacgtccatcttgatgctctggagcacggcgacaccatcgccttcatgcacagcgtgcaggatggcgcggccagtaagagctacggtctggcggtagccgcgctggccggtgtgccgaaagaggtgattaaacgcgcgcggcagaagctgcgcgagctggaaagcattgcgccgagcgctgccgccacgcaggtggacggtacccagatgtcgctgctttccgctccggaagagacctcgcccgcggttgaagcgctggagaatcttgacccggattcgctgactccgcgccaggcgctggagtggatctatcgcctgaagagcctgatgtagttctcgtttaacgtgaaaaaacggcagcgccctgcggtgctgccgttttaacaaatgcaaactgggtgcgagaggatgcatcctgacaaccaatacgcggggttgcccccgcgctgatgctatttcttcgattcgtaagcgagaacagctttaaactccatactacgctctttagtactgagttcgcacagcgagctgcgcaccaaaagcgtaaatcccagtaccgtaatacacagtacgacgattgccacaagggcatattttgttagcatgtcttgcctccctgcaaagaagagactaacatctgaattgttcaggttcattcgtcagcctcagttgatagaaatatctcctggggctttcgtctatctgaatccttgtcaatgctcaaagccagatagcctcaagcacccgccgctattctatattttcccggccgcgaagcttatcggtaatttatcaaacccgttgattttattataaactggaagatggctcgcaaacgtatctgctctattaaccttttatgcaatttgaaaatttaattaataaatattttgcattgattaactaaatataaaaaggcccgactaagcggaccccgttgattttagcgtttatcttccgccagcagcggcggaatatgcggcaccattggcgcgtcatcgatatccttttgggtcatgcggaacgcttccggataatgttcccggctggtgcggcgtagcggttcagtattccgccaggtgtagaaacagtgctggcactgaaataccgtccagacatcttttaccggcgatgttgccagcacttcaatatgttcatcggcgcagcgtggacaaatcatcttcttctccttatttacggttggccagcatggcggtcagtttttcagcccaggctttggtttcaggaagatcctgtaccggctggctgtagtggccgcgcagatcgggcgcaaccggcgtggtggcgtcgataatcagtttgtcggtgatccccgccgggctggagcctggatcaagctccaggaccgacatattcggcagctgcaccaggtcacccgccgggttgaccttcgacgacagcgcccacatcacctgcggcaggttgaacgggtcgacgtcttcatcaaccatgatcaccatcttcacgtagcccaggccgtgcggcgtggtcatcgcccgcagacccaccgcgcgtgcaaagccgccgtagcgttttttggtggagataatcgccagcaggccgtgggtgtacatcgcgttgacggcctgcacctccgggaactcggccttcagctgctgatacagcggtacgcaggtggccgggcccatcaggtagtcgatctcggtccacggcataccgagatagagggactcgaaaatcggcttgctgcggtaggaaaccttatcgatacgcaccaccgtcatattacggccgcccgagtagtggccggtaaattcgccgaacgggccttcaatttcgcgcttgcggctttcaatcaccccttcgaggatcacctctgacccccacggtacgtcgaagccggtcagcggcgcggtggcgattgggtacgggctttcacgcagcgcgccggccatctcatattccgactgatcgtatttcagcggcgtggcgcccatcagggtgataatcggatcgttacccagggtaatggcgatcggcaggtcttcaccgcgctcttccgctttgtgcagatgcagagcgatatcgtgcataggtaccggctgcaggccgagtttacgtttgcccttcacctccatacggtaaatgccgacgttttgcttaccaaaattgtccgggtcgagaggatcgcgagaaaccacgcaggctttgtcgagataaaagccgccgtcgccgtcattgagacggaacaggggcagaatatcgaacagattaatcgcctcgccgtcgacggtattttccgcccacgccgggtttgcccgccgctccggcgtcaccggaaatttatcccaacgacgaataaattcgtcgatctgatttttcaccggcgtattcggcggcagccccagcgagatagcgtggttctgccaggaaccgatggtgttcattgccacgcgcgcatcggtaaaaccgcgaatattgtcaaaccacagcgcgggagcgccatcgccgatgcgcccggtcgcgtttgccgccgcggccagatccggctccgcgttcacttcttcgctaattttcagcagttgcccctggtcgtccagcgcctgcaaaaagctgcgcaaatcatcaaaagccattattcattctcctgtgatacattctctaccgcccgcaacccgctccagcggcgcgctttgtgatactccagaccgaactgatccagcacccgcgtgacaacgtggtcagtgacgtcctcaatggttttgggatggttgtaataagcgggcatgggcggcaccatcgccacccccatgcgtgacagggccagcatgttttccagatggatcgtgctcaacggcatttcacgcggcaccagcaccagcttacgcccctctttcagcaccacgtccgcggcccgccccaccagcccctcggcataaccggcacggatacccgccagcgttttcatactgcaggggataacgatcatgccgtcggtacgaaacgaacccgatgagatgacggcggcctggtccgccggactgtgcgagaaatcggccagcgcagccacttcacgggcgctgtaaggcgtttccagctcaatggtggttttggcccactttgacatcaccagatgcgtttccacttccggcatctctcgaagcgctttgagcagcgccacgcccagcggagcacccgtcgctccggtcatccctacaattagcttcatcatcgcctcataattgttcgtatacgaacatttttattaaaactacgcttgatgagcttttcgtgcaagtgcgttcgtacacggccgcatttttcatcaaaacaggaaaaatgctaaaacgcctcccgaacggctatcatagaaccgacggtttgattacggagttgtcatggagttaaaaaacgaggcgtttcacctgctacgccagctttttcagcagcacaccgcccgctggcagcttgaactgccggacctcaccaaaccgcagtatgcggtgatgcgttccattgccgaacatcccggcattgaacaggtgacgctaacggaagcggcggtcagcacgaaagcgacgctggcggagatgctgagccgaatggagagccgcggtctggttcgtcgcgaacacgatccggcggacaaacgccgtcggtttgtctatttaaccgcagaaggcgaagcgctactggcaagctcaatgccgctgggtaacgccgttgatgaagaatttttaggtcggctgaacgatgaagagcgccagcagttttcgcaaatcatccacaagctgatagcgcgagaacccaattaacccaggcgctcgcggagaaaatcaataaacgcccggaccctgacgggaacgtgctgcgcgtccgggtaaaccgcgtacaccccctggcgcggaaagctaaacgccggcatcaccttcaccagcgcgctgtctgccagcgcagcggccaccagccattcgggcagcagcgcgatgccgctgcccgctagcgcaaaggccatcagcgcgctggcgctatctgccgacagccgcggcgcctgtttaatctcgaaggcgatgctctcctcatcgggcccggtaagcggccagcggagcggcgcggtcagacgttcatgaataatccacgccgcgtgggccagctcctcaagcgtctttacaggatgctgcgccagccatgatggggcagcaaccgggacgatggcaaaacgcgatatcagcgccgcgcggtagcgcgaatccgccagcgtcccgaggcgaatcgccacgtcaaaccgttcggagattaaatccgcgtggtgagaagaagaaacatggcgcacgcggagcgctggatgccgctggctgaactccgccagcgccgggataatcacctgcgcgccatattctggcgtcgttgtgatccgcagttcaccgctcaaccccacgtggctaccccggacgtcgtcctgcaggttttccgccgctttcagcagcgcgaccccgcgatgatagaagagcgaaccggcttccgtcagcgtcagtcgacgggtcgatcgcaacagcagcgtaacccccagctcgctctccagctggcgaatgttgaaactcaccaccgccttggtctgccccagcgccgtcgccgccgcggtaaaacttccgctatcgaccaccgctacaaatatgttcatccgctgcaggttcagcatcgcgccgccaattgtcaaaaaatttcagacagtatatctccgaatgtcgtgtttattcgccctgatgctgaggtttacagtagcggccttcacggggggtttaatcaatgacgtatcgcagcaaggtcgcaaccgtttttctgctgggtttctttctcgacttaatcaatatgttcatcgccagcgtcgcctttccggcgatgggccggacgctgcacgcgtcggtgggcgaactggcgtgggtcagcaatggctatattgccgggctcacgctggtactgccgtttagcgcctggctcagccagcagtttggtacccggcgggtattcctgctttcgctcagcatatttagctttggggctctggccgcaggaatggccgactcgttgaccagccttgtcatgtggcgcgccctgcaggggatgggcggcggactattgattccgccaggccagtcgctaacctggcaacagttcaggcctcacgagcgggcgaaactttccgccgcggtgatgctggtcgggctgctggcgccggcgtgctcgccggcgatcggcggggtgctggtgcaatcgctcagttggcgctgggttttctttgccagcctgccgatcgcgctgctgacgttcggactggcagcgctgtggattaaggatgagagacgcgtcgcgcggccggggggactcctgcgtctctcgctactgcgcgatccgctgctgcgcttttcaatgctggtctatctctgcgtgccggggacttttattggcatcaatgtcgtcgggatgttttatttacaaagcgtgacgggaatgtcgccctccgccatcggcgccctgatgcttccgtggtcgctggcctcgtttgtggcgatcgcgacgaccggccgctatttcaatcgtctcggccctcgcccgcttatcgcggtaggctgccttctccaggcagtcgggatcgtcaccctggctggcgtcaatgcccataccgccagcagtatgttaatcgcggcatttatattcatgggcgcaggcggcagcctgtgcagcagtacggcccagagcagcgcgtttctgaatgtggcgaacggcgatatgccggacgccagcgcgctgtggaatcttaaccgccagctcagtttcctgatgggatctgcgctactggcagccttactgagcgcctttttgctttactggccaacgccgcaggcgtggcgtggcgtatttatcgccgccgccgcgttgaccctggcgccgctgctgggctgccttaccttcgataaccgggcgataatcatgcgcctgcacggtaaaatggagaacaaatgaatcgctatattgcggaagttattgcggcccacgtggctatagaaaactggctgaatcagggtgaagggagcgccgacgcgctgatgcgtcgctttagcccggactttaccatgatcccgataaacggtatgcgcatggatcatcaggcggtcagcgccttttttcacggggctcgcgccagccgtccgggcttaaagattgtcgtcgatagtgccgtcatacttgccgaatggtgcgatggcgcagcggtgagctaccgggaaatacacgcgctccccggcaaagcggaaaccgcgcgctggtcgacggttcttttccgtctgcaggaagagaaaatcatctggtggcacctccacgagacggcgatcgcgtaagcgacggaggcccaaaaaagaaaaaggcccaatcaaacgattgagccttttttaagaaaggtgtcttactcgcggaacagcgcttcgatgttcagcccctggctttgcaggatctcccgcagacggcggagaccttctacctggatctgacgcacgcgttcgcgggtcaggccaatttcgcggcccacatcctcaagcgtcgcggcttcatagccgagcagaccaaagcgacgagccagcacttcacgctgcttggcgttcagttcgaacagccatttgacgatgctttgtttcatgtcatcgtcctgcgtggtgtcttccgggccgttgtctttttcatcggccagaatatccagcagcgctttttccgagtcgccgcccagcggtgtatccaccgaggtaatgcgctcgttcagacgcagcatgcggctcacgtcatcaactggcttatccagctgttcggctatctcttccgcgcttggctcgtggtccagcttatgggacaactcgcgtgcggtacgcagataaacgttcagctctttgacgatatggataggtaaacgaatggtacgggtttggttcatgatcgcccgttcaatcgtttggcgaatccaccaggtcgcgtaagtcgaaaaacggaacccacgttccgggtcaaacttctcaactgcgcgaatcagccccaggttaccttcttcaatcagatccagcagagccagaccgcgattgccgtaacggcgggctatcttgacgaccagacgcaggttactttcgatcatccggcggcgtgacgcaacgtcaccacgcagcgcgcgacgcgcaaaataaacctcttcttcggccgtcagcagtggggaataaccaatctctccaagataaagctgcgtcgcatcgagcacccgttgggttgctccctgcgaaagaagctcttcctcagccagatcgctatcactgggttcctcttcaactaaggctttctcatcaaaaacctcgactccgttctcatcaaattccgcgtcttcatttaaatcatgaactttcagcgtattctgactcataaagatggctcctacccgtgatccctgagcaaagcaccttccgctaaacatcacttaaaagacgcccggacgagaaccttttctgccccggtaaagcaggcattctggccgccctggcgcctcttttagcgatactgagcttatccgtactttgccaaattatcgctgcggtaaatactgcagcgggttgacggatttccccttgtaacgaatttcaaaatgcaaacgtgtagaacttgtacctgtgctacccatggtagcgattttctgccccgccttgatatcttgttgctcttttaccagcatcgtatcgttatgtgcgtaggcgctcaggtaatcatcgttgtgtttgatgataataagattaccgtaaccgcgcagtgcgttaccggcatagacgacgcgcccatctgcggtcgcgacaatagcctgtcctttactgcctgcaatatcaatacctttattgccaccttcggcaccactaaagttctcgataaccttgccatcagtcggccagcgccatgaagagatcggcgaactggttgacgtactgcttgcagtcgattgggttgtgctgacagccggggccgtaacaggcgcgacggttgttgtcgtcgcaggcttgttattcggcaacatcttattagcactctgttcacctgaagattcagaatacgtaatagttggttgggacgcaaccaccgcggtggatttttgtgcagaatttgcggttaacatcccgccgctgctggccttcacgctggcctgggcgacagggttatctccggtgattggctgaccggatgcgttgccaacctgcagcgtctgacccacgttcagtccgtacggcgccgggatattattacgctgcgccaggtcgcggaagtcgttcccggtgacccacgcaatatagaatagcgtgtcgccgcgtttaacagtataggtactgccgccggtatagctacctttcggaatatccccatacttacgattgtagacaattttgccgttcaccgtttgtaccggctcctgagccatcggctggacctgagcgggctgcgtctgcaccggctgcgtttgtaccgggcgcgcctgcggaacgttattggatggaggcgtgatcagcattccggaattcgtgctggaagacgaagtcccgccagccgagctgaccggcgcaggcggattgttggagctgctgcagcctgccagccacagtgacaccagtgataaagccgcaatgcggcttaaggtaaaatttgggcttcccgcgctcatttatcccccaggaatatgttaactaccaatatcttgctcaccggacggcgcccggccaggacacgaaaaatgtgtccaccctatgcctaaatgcaggcaaaaaaacctggaataatccgggttcaggctaactcccccttcacgaggggaacaaagcgcacggcttcgacagtatcaatgacaaactcgttgccgcgccgacggatccgcttcaggaactgatgctcttcgccaaccggcagcaccagtacgccgccatcgtccagctgcgccagcagagcggccggaatttccggcggcgcggcggtaacgataatcgcgtcgaacggcgcacgcgcctgccaaccctgccatccatcgccgtgacgggttgaaacattatgtaaatcaagttgtttaagacgacggcgcgcgtgccactgcaaactcttaattcgctcaaccgagcaaacgtgatgcaccagatgcgccagaatcgccgtctgatagccagagccggtgccgatttccagcacccgggactccggcgttagcgtcagaagctcggtcatccgcgccaccatgtagggttgcgagatggtttgcccctgaccaatcggcagcgccgtgttttcccacgccttatgttcaaaggcttcatcaacaaacttttctcgcggcaccatggcgatcgcgttcagcacgcgctcgtcaataatgccctgcgtgcggagctgattgagaagactttcaacacgtttacttaccattgcgtatcaactccaacgcgatccagccaaccgctaaccacctcatgcgcgccgtgggcggttaaatcgacgtgtagcggcgtgaccgacacatagccttcatccacggcggcaaagtcggtatccggcccggcgtcgtacttttcgcccggcggtccgatccagtacagcgtattgccgcgcggatctttttgcgggatcacctggtcggaaggatggcgactgccgcagcgggtcacgcggatacctttgatctgctcaagaggcagatccggcacgttgatattgagaatgcgcccggtgcgcagcggctcgcggcttaaagcgcgcagaatagagcaggtgaccgcagcggcggtatcgtaatgctgatagccgtttagcgagacggccagcgccggaaagcccagatgacggccttccatcgcggcggcaacggtgccggaatagatgacgtcgtcaccgaggttgggtccggcgttaatgcctgaaaccacgatatccggacgcggccgcatcagggcgttgaccccgagataaacacagtccgtcggcgtgcccatctgtacggcgatatcgccgttatcaaaagtgaaagtgcgaagcgaagattccagcgtcagggagttcgacgctccgctgcggttacgatcgggtgcaactatctgaacctcagcgaattcccgtaaggcctttgccagggtctgaatgcccggcgcatgaatcccatcatcgttactcagcaatattcgcatagtcacccgttgtattgataagctcccttactacgctggtggcgaagctgcccgcgggcagccagaaacgcagttcaacggtaacgtcatcccaccagttccagctcatctgctggggataaagcagcatcgcccggcgggcggcctctactttttcacgcaccagcagcgcctgtagctgcgtctcttcgaccactgccgcctgctcggcggccagcgcatcccgttggcttccccaatcgccgctgcccacaagcgcagcggtaatcatcagctcgcggttatctacccgcgcctggagttccgtcagttcttcagaggccgcaacgaaccagcttccgcgccccgctaattgtagcgcatcgccatcaacaacctgattaaattccggtttttttaatctaataccaacctgttgattaaacaatgcgctgcgggccgccgacaaccaaaaactgcgtttattgcgatcgcgcaccggcgcgccgctctcggcccagcgcagcgcccccagcaggttactgccgccgataccgaagcgctgggcgccaaaatagttaggtacgccatgctcagcaatcgcctgtaaacgcgtttcgacatcgtcgcgatcgctgatttcgcgcagcaccagcgtaaactggttccccttcagcgccccgaggcgcagcttgcgcttatggcgcgcgtactccagtacctgacagccttcaagctgaaatttgctcaggtcgggcatctctttgcccggcactcgggcgcacagccactgttcagtgaccgcgtgtttgtccttctgcccggcaaagctcacttcacgcgcatgaattttaaggaattttgccagcgcgtcagcaacaaaacgggtattgcagccgtttttcagaatacgcaccagcacatgctcgccttcgccgtcaggcgcaaagcccagatcctcaaccaccacgaagtcctccgggttggcttttagcagcccctggctcagcggttttccatgcagataagtgagttcgtcaaaagcgatcatttctccgccttacgcagcagcgccaccgcttcacaggcaatgccttcgccgcgaccggtaaagcccagcttttccgtggtggtggctttgacgttaacatcgtccatatggcaaccgagatcttcggcaataaagatgcgcatctggggaatatgcggcagcatttttggcgcctgggcgataatggtgacgtcaacgttgccaagggtatagcctttcgcctgaatccgccgccacgcttcgcgcagcagttcgcggctgtcggcgcccttaaaggccgggtcggtatccgggaacagcttgccgatgtcgcccagcgccgccgcgccgagcagcgcatcggtcagcgcgtgcagcgcgacgtcgccgtcggagtgggccagcagccctttctcgtagggtacgcgcacgccgccgatgatgattgggccttcaccgccaaaagcgtgtacgtcaaaaccgtgtccaattcgcattaagccttctcctggtgtcgggaacgggtaaggtaaaattcggccagcgccaggtcttccgggcgcgtcactttaatattatcagctcgtccggcgaccagttcaggatgaaagccgcagtactccagcgccgaggcttcgtcggtgatggtcgccccttcattaagcgcccgcgtcaggcaatcaacaagcagttcgcgagggaaaaattgcggcgtcagcgcgtgccataaatcgttacgttcaacggtatgggcgatggctgccctgcccggctccgcgcgcttcatcgtgtcgcgaaccggagcggccagaatgccgcccgtacggctggtttggcatagctgaagcaggcggctgagatcgtcctggtgcaggcaggggcgcgcggcatcgtgcaccagcacccagtcggcttcgccaagaaccttcaggccagcgagaacggagtccgcgcgttccgtgccgccatcaacgacggtgatttgggagtggttcgccaacggcagttggctgaagcgaacgtcgcccgggctgacggcaatcactacccgctgtataagggggtttgccagcagcgcggcgaccgcgtgctcgagaatcgttttgttaccgattgagagatattgtttagggcattccgtttgcatgcggcggccaaaaccggctgccggcaccacggcgcaaacgcccggaaaagtggctgccatgttgtaatcctgggcctgtttatcgattattctgctgttgccccgcggcctggttgcgttttgacgcatccggcaccagacgataaaacgtttcgcccgggcgggtcatactgagttcattgcgcgcgcgctcttcgatagcttcctgaccgccgttgaggtcgtcaatttcggcgaacagctgatcgttgcgtgcttttaatttagcgttcgttgcctgctgcgcggagacatcgtcgttaacccggctatagtcgtgcagaccatttttgccgaaccatagcgagtactgcagccagaccagcaaagccaataacagcagcgttagtttacccatcctgccccctgaaaaacggcatcatcatcccataactcgcccgagttctctactctggcgcgcggacgacgccgcgtaacgcggggactgtaccacatttttaccgttgatacccaggctagattcattcgtagaaaggactaccccagtagccagaggaacagcagaccgaacatcagtccgacggttaaaatcgtcgcgcagacgctgtactgaagtttgccgtccatcagcgaatgcagcgcgatgccaaccacgacggcaaccggcattaatgccaggaagaacggccaggtgtagaggaggacaaatagcgtgttactgccatagatcaggaagggaatacccagcgccagcagccatgaaataaagccaacggcagcgcccgacagagaccaggtggtctcgtcgctgactgccggcggcggttctgaacgaataatactgatgttctgggtattgcgcatatcgaatcctgttgacctggcgatcggcatcctgtgatgatgccgctgccgtttcaggatctgataatatcgctctgtcgtagcaggtctaataattggtgcaccaaatttgttaccaattgttcaccgtcgaggtgaatttcggcgcgctccggggattcatacactgaatcaattccggtaaagttgcgcagctccccggcccgtgccttcttgtacagccctttcggatcccgcgcttcgcagatcgccagcggtgtatcgacaaagacttcaataaagcgcccttcgcccaaacgttcgcgcaccatctgccgctctgcgcgatgcggtgatataaacgcagtcaatactaccagcccggcatccaccatcagcttcgccacttcacccacccggcgaatgttttctttgcggtcgtcgtcgctgaagccaagatcgctgcacaggccgtgacgcacgttatcgccatccagtaaataggtgctcacgccgagccgatgcagcgcctcttccagcgcgccggcaacggtggatttccccgagcccgaaagcccggtgaaccacagcaccacgccgcgatggccatgatgctgctcgcgctgcgcctgcgtgacaggatgcgcgtgccagacgacgttttcgtcatgccgggccattacttgcctcccagcaggtcgcgggcgtcccagtgcgggaagtgcttgcgaataagctggttcagctcaagctcaaacgcgctgtattgcgaagcgcctgcctgagcctgctcgttcggttcgcgtaccatccctgcgccaacggtcacgttagtcaaacgatcgataaaaatcaggcccccggtgaccgggttatcctggtatttatcgagtaccagcggctcgtcgaaagtcagatccaccagcccaatgccgttgagcggcagcgattccacttcacgctgggtcaggttgttaatatcgacctggtagcgtacgccatccacgcgggcgcgggttttcttaccggcgattttaatgtcatagctctggccaggcgttagggcctgctccgccatccataccacatcaacgctggcgctttgtaccgcaggcagagagacagtcgcgtccaccagcaggtcaccgcggctgatatcaatttcatccttcagcacgagagtgatcgcttccccggccgccgcttccggcagatcgccgtcaaaggtgacgatgcgcgccacggtggattccacccccgacggcagcactttcaggcgctgtcctacgctcacgctgccggcggcaaccgtaccggagaacccgcggaagtcgaggttcgggcggttgacgtactgcaccgggaagcgcagcggctggctttccaccacgcgctgaatctcaacggtttccagcacttccagcagcgtcgggccgctgtaccacggcattttatcgctctggctggcgacgttgtccccttcaagcgcggaaagcgggacaaagcgaatgtcgagatcgcctggcagctgttcagcaaaggtcagatacgcttcacggatggtgttaaaggtctcttcgctaaaatcgacgaggtccattttgttcaccgccaccaccaggtgtttgatccccagcagcgtggagataaagctgtgacgacgggtttgatcgagtacgcctttgcgggcgtcgatcagcaggatcgccaggtcgcaggttgacgcgccggtcgccatgttgcgggtatactgttcgtgtcccggggtgtcggcgataataaatttgcgcttctcggtagagaagtaacgataggcgacgtcgatggtgatgccctgctcacgctcggcctgcagaccgtccaccagcagcgccagatcgagtttttcgccctgggtaccgtgacgtttgctgtcgttatgcagcgaagagagctgatcttcgtaaatctgacgggtatcgtgcagcaggcggccaatcagcgtacttttgccgtcgtcgacgctgccgcaggtcaaaaagcgcagcaggcttttgtgctgctgggcatgcaggtaggcttcaacgccgccttcgttggcaatttgttgtgcaatagtcgtattcatggcggctccttagaaataaccctgacgtttcttcagctccatggagcctgcctggtcgcggtcaatcacgcgcccctgtcgttcgctggtggtcgagaccagcatctcttcgatgatctccggcagcgtttgcgcattggactccaccgcgccggtcagcggccagcagccgagggtgcggaagcgtaccatctgttttttgatcatctcgccgggctgtaaattgatgcgatcgtcatcgatcatcatcagcatcccgtcgcgctccagcaccggacgctccgccgccaggtacagcggaacaatttcaatattttccagatagatgtactgccagatgtccagctcggtccagttggagagcgggaatacgcggatactttcgcccttgttaatctggccgttatagttgtgccacagctccgggcgctggtttttcggatcccagcggtggaagcggtcgcggaaggagtaaatacgctctttagcgcgggatttctcttcatcgcgacgggcgccgccgaacgcggcatcgaagccgtatttgttcagcgcctgcttgaggccttcggttttcatgatatcagtatgcttggcgctgccgtgcacgaacgggttaatccccatcgccaccccttccgggtttttgtgcaccagcagctcacagccgtaggctttagcggtacggtcacggaactcgtacatttcgcggaatttccagccggtatcgacgtgcagcagcgggaacggcagggtgcctggataaaacgctttacgcgccagatgcagcatcacgctggagtctttgccgatggagtacatcatcaccgggttagagaattcggcggccacctcacgaatgatatggatgctttccgcctccagttgccgcaggtgagtaagtcgtttttggtccataaccgttccttaagccagatttactacagaagccttgaaggcgtctgaggatgaggtgtgttgaaaccaggcgagctgttgatgtaattgcaccacttcacccaccaccagcagcgcgggcatcggggcgtctttcgccaggttttcaagctgttgtaatgtgccggtcttcgtttgctgatcggcgcgggtgccgcgcgagattaccgccaccggggtatcgcctccgcgaccgttggcgatcagctgagcgctgatttccgccgctttcagactgcccatataaatcgccagggtctggccgctttgcgccagccgcgcccagtcgagcggtgaattttcagcgccaaagtgcccggtaatgaaggttacgctctgggcataatcacgatgcgtcagcggaataccggcataggccgttgcgcccgccgccgccgtgacgcccggaacgacctgaaatggaatgccctcttcggctgcggcctgcagctcttcaccgccgcggccaaaaataaacgggtcgccgcccttcaggcgaatcaccgtcttgcccgctttcgccgcttccagcagcaggcggttgatctcctgctgcggtacagatacgccggcggcgcttttgccgacgcagattgtctccgcgtcccggcgcaccagttcacgtacttccggggtgaccaggttgtcgtaaaacaccacgtccgcctgctgaagggcctgcaggccgcgcagggtcagcaatccggcatcgcctggccctgccccgacgagaataatttcaccagggcgtttttccggctgccgaagttcatcttccagcgctttttccgcttcatctttattgcccgccagcatcaggctggcaaagcgacctgtaaacacgcgctcccaaaagcggcggcgttcggcggtggttttcagatgggttttaatatggtgacgccagtagctcgccgtttcagccagccgcccaaggttggtgggcagcagcgcttcgattttttcgcgcaaaatccgcgacagcaccggcgcttttccgctggaagagatagccaccagcagcggagagcgatcgacaatggatggaaagacaaacgagcacagcgcctgattatccacgacgttgaccagccgatagcgcgcgttagccgcgacataaacgcgttggttcagctcgtcatcttccgtggcggcaatcaccaggaatacgtcgtcaagctgctgctcttcgaatacggttgcccgccactgaatttcctcgcgctcgaccttttcggcaagttccggcatcagcgtttcggcgacaatttgcaccttcgcttcagcgcgcagcaaaaacgtaatcttacgcgcggctatctcgccgccgccgatcaccagcacgggtctgtctttcacttcggcaaatatcggcaagtattccactgcgcaacaactctcttacaatcagcaatagagcgactatagggtgcggtttagagcaaatgaaattacgaaatggaatgagttgttactcaaaagaataacgacctgggaaagcaaatatcaaaaagtgcttaacacgcggtttttccaccatttaagagcgattgaaattgtttaaccccggtcacagtttcatactacgcgggtgaaattgttttaagtgctaaaggaccccctatgttttccgcattgtgccgtcgcctgctccccctggcgttgggcgcaggttttgtcttctccgccgccccggcattcagcgccccgggcgaaaccgccaatgcccaggctcgtcatatcgccaccttttatcccggaagaatgaccggcacgccggccgagatgctgtcggccgattatctccgccagcagttcgcccagatgggctaccagagcgatgtgcgcagcttcaatacccgctacgtctataccgatagcaatcagcgtaaaaactggcataacgccaccggcagtacggtgatcgccgctcatgaaggccaatctcgccagcagattattatcatggcgcacctggatacctacgcgccgcagagcaataaagatgttgaaaacaacctcggcggcctgaccctgcaagggatagacgacaacgcgatgggtctcggcgtcatgctggaacttgctgaacagttaaagaacgttcctacccgttacggtattcgcttcgttgccaccagcggcgaagaagaaggccggctgggtgcgcagaatctgcttaagcgcatgagcgacgcggaaaagaaaaacaccctgctggtgattaatctcgataacctggtcgtgggcgataagctgtactttaatagcggccgcagcacgccagcatcggtgcgcaagctcacccgcgaccgggcgctggctatcgcccgtagccacggcatcgcggccttcaccaatcctgggatgaaccgggacttcccgaaaggcaccggctgctgcaacgacgccagcgtttttgatagcgccgggatcccggtactgtcggtggaagcgaccaactggtcattgggtaagaaagacggttatcagcagcggagcaaatcacgcagcttcccacagggcacgagctggcatgacgtacagctggataacctgcagtatattgataaagcgctgccggggcgtattgagcatcgcggacgcgatgtaatgaaagtgatgctgccgctggtgaaagagctggcgaaggcggagaagagacccgcctcaaaatagactaacgataaaatcaggcaacaaggactgtcgccatgatgcgttttcattttttaataccattgttgctactggctgccagcacgcgatccatcgccgacagccaggtttatatctggcagcgcgtctggcaggacgggttggatttgggctcggaacccagcatcggtaaaacatcggtataagcgctatgttaaaaacggcgcactgttcccatgagcccaaaatttggcaagtattacctggaagcggactttgccacactaaagaatgctggaaaaaataaagtacaggataataaggatggcggcgcggggaacacgtgtattgaactgttgccacgtttcctccgggcggtttatccctgctggcgcggggaacaccattcagacatcaaccaagcgtttcgtgagtccggtttatccccgctagcgcggggaacacgatgattgcgctcggatcacttgttaccattgcggtttatccccgctgacgcggggaacacgcagcctgaacagcaagggtgcgctctgaagacggtttatccccgctggcgcggggaacacgcaaaataccaggtcgccccaatctgtcgcgacggtttatccccgctggcgcggggaacacgtgccgcgccgctgcgtgaagacctgcgtaatcggtttatccccgctggcgcggggaacacttcttccgccttcgctatgtctgcatcaatctcggtttatccccgctggcgcggggaacacatccgctcagtaaagcccagcccgtttacgttcggtttatccccgctggcgcggggaacacattcactgattcgcccctacgaccgcctggcccggtttatccccgctggcgcggggaacacctgtgccatctggaaccagttagcgcgctgctcggtttatccccgctggcgcggggaacacggaaccatgcgtaaatcagaagttatcgaacacggtttatccccgctggcgcggggaacacgcctcaggttgatgtaagtgttgctggattttcggtttatccccgctggcgcggggaacacagctatagtcagtgacaagtattccgttgtgccggtttatccccgctggcgcggggaacacaatgacaatcgcagaccataccctcccgtcaacggtttatccccgctggcgcggggaacacgaggagacggtattcatggagtagtcgaaacccggtttatccccgctggcgcggggaacacgaggtcgtgaaaacggaaatcctctatccccgcggtttatccccgctggcgcggggaacacactattttcggagttaattatggcaaaaaaaaccggtttatccccgctggcgcggggaacacgggagaagtctctgggcttacggcaagacaattggtttatccccgctggcgcggggaacactttcgtgaccgcttcgatgagtggccaaacggcggtttatccccgctggcgcggggaacacctcatagactcatatctatttgagtactcaaccggtttatccccgctggcgcggggaacacgccggttccggtgcgatcggtctcgttgaactccggtttatccccgctggcgcggggaacactctttcgtatcaggcccactgtctgacgggttcggtttatccccgctggcgcggggaacacggctgatagtgctgccagaatccccctcgtagcggtttatccccgctggcgcggggaacacttccatgccagtatcaaccgggatcggcatatcggtttatccccgctggcgcggggaacactctctgaaaaactcgcttgtgttaagccttcgcggtttatccccgctggcgcggggaacacttgccggtgataagtatctctttgagcgcttccggtttatccccgctggcgcggggaacacagagcgtggcggaaagtaaaatcgtggtattgccatcgctggcctgtttttcaatcagactttccagaatccgcgacatataggcgtcataggcgtgaatctcatccgccagcaagattttattattcagccctaacatccgcaggttattgtgtttaaacggcatcaccgccatcatcgcctgatcgagcgtgccaacgcccacctcggccaacagcgcttttttattactgtcggcaaaccaggcggcgcatccctggctggatggctggagctcatcgggttcttctgaacccgataaatctcccgaccacaaagactgattgaagcgatccattaatccacgtgcgctatgcgccagcaccaggcttggccgtgaaccgggttgatacaacgccagccagctctccgacatacgatcgaacatggcattcgccgtcgccatcgtcggcagaccaaaatagagcccctgcgcctttcccgtagccatcaggcgatgtgtcaaaataagcgcagcctctgtttttccagcaccagtcacatcttcaagaataaataattgcggaccttgtttatcaatatccagctcaagcgctttttgctgtaatggggttggctgttgaataaagggaaataacgccgttattccgctaaaagaggcaacgtcaggggaaggcgggaaaacggtcacggctactttcgctttaaccagcgcatgttgttgccagtattcatcgacctccatcgattttgtaattcgggggaaatattgggttgaagaaccaacccagtcagccagtactatcgcagcggaaataaaccatgagagatgtttaaaaagcgcaataccgttatcatcatcccaaaaatcaggaatctcaatcagtggaaataatgatttaaccctggtaagaaaatcacgggccgcttctttatcctgctgacgaaaattttttagttctgttactgaagaaggcggtcgcccatgatgtcctgtcgtaaggggcatccaaagcgcaatgacgcgctttaacttccgagcagaaagaggggattcggggaaaagttccgcgcactcgcttaaataatctttccagagccaataccccagggtcgcatgcgggatggcttcataatattttatatattcgtcctgcgcatttaactcttcatgacgataaagctgctgaaaagagtgggcaaactttccaatatcatgccagcataatagccatgcaaaaaattgtgccgcctgaactctatgatgaagccccagtttgttaagataatcattaatgccatggatattatgctgcaccatccaatagccaacggctgcaacatccagagaatgccagcacagcaagtgataatcatcaccgccatcatcctctccacggcgggatttaccccaataattgaacattatctctattattccatttagcaggcgtatttattcaagtatgttcacactgcaaaataagagaaatgatttacatcaaaaatattttatctttgcgatgaaattgataacaaatatcaattattaataattataaagacatcaaatcattaattaacaattcaggaaaaaatcccggcagcgccgggactcatcttagccttcgtgcagcccgcactctcttttcaggccaaagaagcgcgtttcttcctccgccatccccggctcccatttccgggtggtgtgggtatcccccaccgacaaatagccctgatcccacagcgggtgatacttcaggccgtgcttttgcagatactgatagacggtacgattatcccagtcgatgatcggcagcaccttaaacacgccgcgctggatcgccagcaccggcaggtgggcgcggctgccggactgctcgcggcgcaggcccgcaaaccaggtttgcgcattcagctcttccagcgcccggttcatcggctcaactttgttaatatcattgtacttttcaataccctcaacgccctgctcccacagcttaccgtagcgcgcctcctgccaggcggcgctctccttcgcccgatagatcttcaggttcagattgagtttgtccgttaactcgtcgataaactggtaggtttccgggaacagatagccggtatcggtcagaatgaccggaatatccgggcgcacctgattgaccagatgcaggctcaccgccgcctgaataccaaagctcgaagagagcacatattcgcctggcaggttttccagcgcccacgcgacgcgcgcttccgcgctcagcttttccagctggctattggtttccgccagttgcaaaacacgatcgaccttcggtaatgcgttcagcgcgtttagatcgagtacggacataagaacctcgcttgcctgtttcgccgggcggtactgcgtttgcccggcctacaaaacccacaggcccggatcgctgctcgccaccgggcacctggatgttattcccagaaatcacgggctgggtcgagcaccgggcgaatgatgcccgcacgcaccgtaaagtcgccgaagccttcacccgcttcgcgctctttcgcccagcgccctaccagttcgtcgatcgaatcgagaatttccgactcggtaatgttttcccgatacatacgcggaatacgcgtcccgctgcggttgccgccaaggtgcaggttatagcggcccggcgctttaccgaccagccccacttccgccagcatcgcgcggccgcagccgttcgggcagccggtaacgcgggtaacgatatgctcgtcgccaacgccatgtttgctcatcagcgcctcgactttatcgataaacgacgggaggaaacgctcggcttccgccatcgccagcgggcaggtcgggaacgacacgcaggccatagagttttcgcgctgcggcgtgacggcattcatcaggccgtgatcgcgggccagcttctcgatcttcgccttctgatcttccggtacgctggcaataatcaggttctggttcgccgtaatgcggaattcgcctttgtggatcttcgcaatcttcagcaggccggttttcagcgggcgacccggataatcaaggatacgaccattttcaataaacagcgtcagatgccagttattgtcgatacccttcacccagccgatacgatcgccgcggccggtgaattcgtacggacggatcggctcaaacttgatgcccgcccgacgttccacttccgccttaaaggtctcaacgccaacgcgttcgagggtgtatttggttttcgcatttttacgatcggtacggttaccccagtcgcgctgggtcgtgaccaccgcttccgccaccgccagagtgtgctccagcggcagatagccaaactcgctcgccgtacgggcgtaggttttcttattcccgtgctcaatcgataaaccgccgccgaccagcaggttgaagccgaccagcttgccgttttcggcgatggccacgaagttcatatcgttcgcgtgcagatcgatatcgttctgcggcgggatcaccacggtcgttttgaacttacgcggcagataggtctgaccgaggatcggctcttcatcggtggtggcgactttcttctgatccagccagatctcggcgtaggcgcgcgtgcgcggcagcaggtgctcggagatcttcttcgcccattcgtaggcttcagtatgcagctgggactcgtacgggttagaggtacacagcacgttacggttcatatcgttggcggtggccaacgcgtccagcccgaccgaatgcagcatctggtgcaccggcttgacgttcttcttcagaatgccgtggaactggaaggtctgacggttggtcagacggatactgccgtagatggtgttatcggcggcgaatttatcgatcgcctgccactgtttggtggtgatcaccccgcccggcaggcggcagcgcagcagcatcgcgtgacgcggctccagcttctgcgccgcgcgctcggcgcggatatcgcggtcatcctgctggtacataccgtgaaaacggatcagcagaaagttatcgcctttaaaaccgccggtcaggccgtcgttcaaatcttccgcaatggtgccgcgcaggtagttgctttcgagcttcatgcgctcggcgtcagtcagtttaccttcgaccaccagcgggcctggatgtttttcgctcattagtagacatctcgctgataacggcgctcaacgcgcagctcacttaaaaattcgtccgccgcttcggcgtccatcgcgccgtattcggcaatcacttccagcaacgtctgctcaacgtcttttgccatacgattggcatcgccgcagacataaatatgggcgccgtcgttaatccagcgccacagttcggccccctgctcgcgcagcttgtcctgaacgtagactttttgttgttgatcgcgggaccaggccaggtcgatgcggctcagcacgccttctttgacgtagctttgccactccacctgataaaggaaatcttcggtaaagtgcgggttgccgaagaacagccagttcttcccttccgcgccttccgccgcgcgctgctgcataaaagcgcggaacggcgcgatgccggtgccggggccaatcatgatcaccggcgtctgcgggttggcaggaagacggaagttatcgttatgctcgataaagatgcgcacttcgccatcttcttcgacgcggtcagccaggaagctggaagcgccgccggcccgagcgcggccttcgatgtcataacgcaccacgccaacggtgacgtggacttcgctttccacttccgcctgcgaagaagcgatcgagtacagtcgcggcgtcagcgggcgcagcaggtcgaccagcgcctgggcatccagctgcgccggggagaaacgcaccatatcgacaatcggcgtggtcgcggcgtaatgctggagctgtgccttatcgcccaccagcggcagcagggattcgctgcgggttaaggtggcataattttccacgatgttaccggtgttgaccgtcagctcaaagtgccactccagcgcttcggcgagcggcagcgttttgccgtcaaccgtgaccggctcctcgcccgtcagccacagcagctctaccagctctttcaccagagccggatcgttctggtaccagacgcccagcgcatcgcccggctgatagcgcaggccggagtcgccgaggtcgatttcaatatggcgcacatctttttcagaatcgcgaccggtaattttttgattcaccgccagcgtcgcggtcagcggcgcttctttggtatacgggctggtgtggatctcgttcaccgccccgctggttaccagctgagacggggcggcggcaggggcgcgcgctttcagcacctcaaccacccgagcgcgccattcggcggcggcggcctgatactctacatcagcatcaacccggtcgagcaggcgttcgccgcccagctcggccagcttattatcaaaatctttgccggactggcagaagaattcataggaggtatcgccgaggccaaacacggcaaatgcggtatcggtcagcttcggcgccttcttcgagaacaggaacttatgcagcgcgacggcttcttccggcggctcaccttcaccctgcgttgacgtcaccacgaccagcagcttttcggaggcaatttgtttgaatttatagtcgcctgcgttgaccagcttcacgttcagctgcgcggcctgcagatcgtcgcgcagcgcttcagcgacgcggcgggcgttgccggtttgcgatgccgaaatcagggtaatagacggtacttcagccgcctgggctggtgcaacaaccgccgcgccgggctgctggttcagcaccccccaaaaatagccggaaacccaggccagctgggtgggcgtgaagtcagtcgtggccgcctgaaggcgcgccatttgctccggactcagcggtagcaaattggaaggtggggcctgtgtcgtcatgcgttgttatgttccagtaagcaaagctgtgattcacgccctgtcagcgtgataaacagaagataatgtatttactctaaataattcgagttgcaggcagcgacacagcgcccatcagggcaaagcccaaggctgggccgagttattgccaacgcacatgcggctcgaagtatgacgagtgagtaggttaacggtgcaaatagtaacaactaaataaaggatggaaataacaaataaccaaatggactaacctgttttagttatagttattaacaacaaaatcgattaaataagcccatgaaatataggcaattaatttgaacaggctggatgaatgtggctattttccgctcagggccgttttagttaatgcgaaaaaatgtgctttccggtaccctacggcggttttttgccatattgagaagaaaagatgtccaccacgctgtttaaagatttcacctttgaagccgctcaccacctgccgcacgtgccggaaggtcataagtgcggtcgcctgcacggccactcttttatggtgcgcctggagattaccggtgaagtcgatccccataccgggtggatcatggactttgccgagctgaaggccgcgtttaaacccatctacgatcgcctcgaccattactatctgaacgatattcccgggctgtccaatccgaccagcgaagtgctggcaaaatggatctgggagcagatgaaaccgcgggtaccgctgctgagcgcggtgatgatcaaagaaacctgcaccgcgggctgcgtttatcgcggcgagtgatagtgcctttagctgaataagcccctgatagccctgcgctatcaggttttttttatatcacgcgatattgaggtacttgtgcgtctgcatcgacaagcgccagttgcgggcgatacaggtttcgatgcacaggcgcgtcgcgtcatctttctggctaatcggctgaagcgcgatgatacgcggcttttcatcggccagcgttgccagcagctcatccagcgcttcgatatcgcgcacgcgtccaaccggatgtttaatttcatcagcccgctgtagcgcctgagagagtacgtcatagccgccgcgcatgtttacctttggcgacaccgtcacccaggtatgcggcgtgcagcgcacttcatgggtgccgctggtttcaatctggcagctaaatccgttttgctccagtaaagaggttaacggcgttaaatcatgaatgcagggctcgccgccggtaatgaccacgtggcgggccgtccagccctgacgcccgatgatagccagcagatcttcgctgctcgccgggccccatttatcgctctctttggtttttgccagaatgctgaacagcgacacttcccgatcggcaagcttatcccaggtatgtttggtatcgcaccaggcgcaaccaaccgggcatccctgtaaacgaataaaaatggcgggaacgccggtgaagtaaccttcgccttgcaaggtctggaacatctcgttaatcgggtactgcataatcatctctgcttagggttgtgagcgcgcattatcgcagatttgcccgcgcagatcttgtcccgcgctgcgccgcgtggtgggtagaacctaaaccttaatgataaacctccggcagctggccgattccattatcccgcaccggctgatttaattagtctgataatcatcaggcgactattaagcggtacggctaaaatttttggtgtaacaaaacatgtataatcttgaaagcaaaaaataaaataacaaacttaaaaataataaatttcaacgatgtacaaatggatacacgaaataatgaatttattgtcatagcttagggtcaaattcgatccacgacgctaaatcatcttaaaataaccttaataaaccgcaccttatgttcattttccatttaatatccgtttaattttccgcgcctagaatccagtcaaccaaccataatgagactgcattcatgaatacattattaattactggcgcgaccggttttctcggtggagcagtgttagaaagcattctgaataaaaagaatgcgcctaatctattactgctagttcgtgcagataatagtgtagctgccgtagaacgggtaaaggaaaacctgcgaaaattcaatattagcgaagagagattaacggtcctgacgcccggcaacattctgctgggggatctggccaatccgcagccctttctcgacgacccgcgcctgaatcagctgacccacgtgctcaactgcgccgccgtcgcctcatttggtaacaatccgcttatctggaaggtcaacgtcgaaggtacgctgcagtttgcccggcggatggctcaggtcagcggccttgagcgctttctgcacgtgggcaccgcgatgtcctgctcgccagaccccgattcgctggtagcggaaagcacgacgtttcgtgaacgcgccgagcatctggtcgaatacacccactctaaatcaacaattgagcgtctcatgcggcaggagtgcccaacgctaccgctggcgatcgcccgtccctctattgttgttggccacactcatcacggctgtcagccctccagcagcatcttctgggtgttcagcatggggctgatgctgcaaaaatttatgtgttcgatggaagaccgcatcgatgtaatccccgtcgattactgcgccgatgcgctgctgatgctgcttaccagcccgctggcgcgcggagaggtggtgcatatttccgcgggagaggaaaacagcgtaaggtttgcggatatcgataacgcgatggcctccgccctcgagcaggcgccggtcggcgataaatacgcgcaggtcagctatgaaacgctggtcaaaatgcgccgtgaactgaaggctatttttggcccctgcaacgaacggctgatgctaaaagccatgcgcctgtacggcgccttcgccacgcttaacgtacgattcagcaacgacaagctgctcagcatgggtatgccaaaaccgccgcgctttaccgattacattgaccgctgcgtacagaccacgcgcgggctttctatcccgcagcaaatggcggtagattttaagtagccgcttttgcaggtataaaaaaagccagcccgaaggctggctttttcatatcagataaagacaggcttatgcctgacctttgatctctttacgaccgttgtacggtgctttttcgcccagcgcttcttcgatacgaatcagctggttgtatttagcaacgcggtcagaacggctcatagaaccagttttgatctggcctgcagcggtacccacagccaggtcagcgatggtcgcgtcttcagtttcgccagaacggtgagagataacggcagtgtagccagcgtctttcgccattttgatcgcagccagagtttcggtcagagaaccgatctggttgaatttgatcaggatggagttaacgatgcctttctcgatgccttctttcaggatcttggtgttggttacgaacagatcgtcaccaaccagctggattttgtcgcccagtactttagtctggtatgcgaaaccgtcccagtcagattcgtccaggccatcttcgatggagacgatcgggtactgtttggtcagctcttccaggaagtgggtgaattcttcagaggtgaacgctttgttgccttcgccggccagaacgtatttaccgtctttgtagaattcagaagccgcgcagtccatcgccagagtgatgtctttgcccagctcgtagccagcagctttaaccgcttcagcgataacagccagcgcttcagcgttggagcccaggttcggcgcgtagccgccttcgtcaccaacagcggtgttcatacctttagctttcagaactttagccaggttgtggaacacttcagaacccatacgtacggcttctttcagggatttagcgccaaccggctgaatcataaattcctggatgtcgacgttgttgtcagcgtgctcgccgccgttgatgatgttcatcatcggaaccggcatggagtatttgcccggggtgccgttcagctcagcgatgtgctcgtacagcggctgacctttagaagcagcggcagctttggcgttagccagagagacggccaggatagcgttcgcaccgaagttagatttgttttcagtaccgtccaggtcgatcatgattttgtcgatgccagcctgatctttggcatctttgccaaggattgcctgagcgatcgggccgtttaccgcagcaacagctttcagtacgcctttacccatgaaacgggatttgtcgccatcgcgcagttccagcgcttcgcgggagccagtagaagcacctgacggagcagctgccataccgacgaaaccaccttccaggtgtacttcggcttcaacagtcgggttaccacgggagtcgatgatttcacgaccgatgactttaacgattttggacattaggttttcctcagtacaagttaaactaaaactccagacaaacaatgcacccggatgggtgcattgccgttctaactcttttacttcgcctgacgcttctggtactcgcctgcggctttcacaaagccagcaaacagcggatggccatcacgcggcgtcgaagtaaactccggatggaactgacaggcgacgaaccacggatggttaggcacctcgatgatctcgaccaactgatcatccccggaacggcccgcaatacgcaggcccgcattttcaatcggcttcagcaacatattgttgacttcgtagcggtgacgatggcgttcggtaatggttggctcgccgtacagctggcgcaccaggctatcttcagccagctggcactgctgtgcgccgaggcgcatcgtgccgccgagatcgctcttatcagagcggacttcgacattaccgtcttcatcacgccattcggtaatcagggccacgaccgggtacttacagtctggcacaaattccgttgagttggcgttttccatccccgctacgttgcgcgcgaactcaatcagcgcaacctgcatccccaggcaaatgcccaggtatggaatgttgttttcacgcgcgtagcgcgcggtggcaatcttaccttcaaccccgcgatagccgaagccaccaggaatcaggatagcgtctaaattcttcagaatttcgacgccgcgcgtttccacatcctgcgaatcaatcagcttgatgttgacggtgacgcgatttttcagaccgccgtgtttcagcgcttcaatcaccgatttgtaggcgtccggcagttcaatgtacttgccgaccataccaatggtgacttcacctgccgggttcgcttcttcgtagataacctgttcccattcggccaggttcgcttccggacagtttaagctgaatcgtttacaaatataatcgtccagcccctgagatttcaacaggcccgggattttataaatggaatcgacatctttcatcgaaataacggctttttccggcacattgcagaacaatgcaattttggcacgttcgttcgccggaatagcgcgatcggagcggcagaccagaatgtcaggctgaataccgatggagagcagttctttaacggagtgctgggtcggcttggttttgacttcacccgcggcggccatgtacggcaccagggtcaggtgcataaacagcgcgttttcacgaccgatatccaccgccagctggcgaatcgcttcaaggaacggcagcgattcaatatcaccaacggtgccgccgatttcaaccagcaccacatcatggccttcaccgccggccagcacgcgctctttgatcgcgttggtgatgtgcggaataacctgaacggtggcgcccagatagtcgccgcgacgctctttgcgcaggacgtcagagtaaatacgacccgtggtgaagttgttgcgacgggtcatcttggtgcgaatgaaacgctcgtagtgacccaggtccagatcggtttcagcgccgtcttcagtaacgaacacttccccgtgttggattgggctcatggtgcccggatcgacgttgatgtacggatccagtttcatcatggtcacgttaagcccgcgggcttcgagaatggctgcgagggaagctgcggcaatgcctttacccagagaggatacgaccccgccggtcacaaaaatatagttcgttgtcatgctgaacctgagaagttaggtttaaaagacgatggaataaccaggacgggaaagcagtatacccgatcatgactgacgccacaaactttcattatccctccttttcatcaggcccacacaaacgcagggagtgagaaaatagccgcttttggcgaaatgtttttgacgtaaatcaagcgcttgttatttaaaaaatcacacaaatagcgcttgatcacgaaaactctttagagatcagtttcctggcgttttacttcctgccacacccgctccatggtatcgaggtcaacgccggtcatttccaggccgcgcgcggcgacaatccgctcaacttcgcggaacctgcgctcaaacttcaggttggctttttgcagcgcaacttcggcttttacccctaaatggcgggataaattgaccgtcgcaaacagcaggtcgcccacttcctcctccagtttagcttcatccaccacggcctgctgcgcttcgtgcatcacttcatctatttcttcgtgcactttatccagcaccggccccagagaggtccagtcaaagcctaccgccgagcagcgtttctggattttatgcgcgcgcatcagcgccggaaggctatgcgggatgtcgtccagcgcggagtgctgggacttttccgctcgctcagcgcttttgatctgctcccagcgggccagcacttcgctgctgctaccggcgctcgcctcgccgaaaatatgcggatgacggcgctccagcttgtcgctgatggcggcgcagatatcgttaaaatcaaagcgcccctcttcctgcgccatctgagcgtagaagacgacctggaacaacaggtcgcccagctcaccgcgcagatcgtcaaaatcttcgcgggcgatagcgtcgagtacttcataggtttcttcaagggtatacggcgcgatggtggcaaaggtctgctctttgtcccacgggcagccgttttccggatcgcgcagacgccgcataatgccgagcaggcgttcgatttgagtcataagtctgtcctgataaaaaaatgccgggtggcggtagcgcctgacccggctgacataagcgtgggagtttatccgccgtgcagacgacgggcgtcgatgacgtcaggtacctgattcagcttcgccagtacgcgccccagcacctgcaggttgtagatctcaatggtcatatcgatcgtcgccatctgctgtttagtatcgctgcggctggcaacgcccagcacgttgaccttctcattggcgagaatggtggtgatgtcgcgcagcaggccgctacgatcgttggcctggacgcgcaccaccagcgagtagcccgccgagtagctctctccccacaccgcgtcaacgatgcgctcgggagcatgagactgtagctccgcgagctgatcgcaatccgcgcggtgcaccgagatcccgcggccctgggtgataaagcccacgatctcgtcgccgggaatcggctggcagcagcgcgcaatgtggtgcatcagattgccgacgccctccaccaccacgcgaccattgtctttgctgcgattctgcggagcgtgggttttctgctgcagctgctttaacgccgccgcatcctgctccgccgcgctgggtttattaaactgcgcctgcaggaaattaaccatctggttgaggcgaatatcgcccccgccaatcgccgccagcagttcgtcctgctcattaaagttgtagcgcggcagcagatgcttttccgcgtccttcaggctgatgcccagatgctcgagctcatcatcaaggatctgtcgcccggcaagaatattcttgtcgcgatcctgcttgcggaaccaggcgtgaattttggaacgcccgcggctggtggtgacgtagccaaggttcgggttcagccagtcgcggctggggttgggctgcttctgggtgatgatttcaatctggtcgcccatctgcagctgataggtgaacggcacaatacgcccgccgattttcgccccgatgcagcggtggccgacatcgctgtgtatatggtaggcaaaatcgagcggcgtcgaacccgaaggcaaatccaccacgtcgcccttcggcgtaaagacataaacccggtcatcaaagacctggctgcgcacctcatccagcatctcgccggaatcggccatctcttcctgccaggcgatcagtttacgcagccaggcaatgcgatcttcataaccgcgcccgccgctggccgctgcgctggcgccctctttatacttccagtgcgcggccacgcccagctcggcatcttcatgcatctggcgggtacggatctgaatttcaatggtttttccgccggggccaagcacgacggtatgaattgactggtagccattaggcttgggattggcgacgtaatcatcgaactcatccggcagatggcggtaatgagtatgcacgatccccagcgcggcatagcagtcctgcaggcgctcggcgacaatacgcaccgcccgcacgtcaaacagctcgtcgaaggcgagatgttttttctgcattttgcgccagatgctgtagatatgcttgggacgcccgtagacctcagccttgacgccctcggttttcatttccgtgcgtaaatggctgacgaattcatcaatataatgttcacgatcgatgcgccgctcgtgtaacagcttagcgattcgcttatattccgccggatgcagatagcggaagcagtaatcttcgagctcccacttcagctggccgatccccaggcggttggccagcggcgcgtaaatattggtacactcttttgccgccagtacgcgctcatcttccggcgcatctttcacttcacgcagatgggcgatgcgctcggcgattttaattaccacgcagcggaagtcatcgaccatcgccagcagcatgcggcgaatgttgtccacctgttcagaggagaccgaatccgtatgggtggctttaagctggcgtatcgcggccatgtcccgcacgccgtggatcagggtgacgaccgatttcccgacgctctcctgcatgatctcttcgctgacgacgttgccgtccgccagcgggaaaagcatcgccgcgcgcagcgtatcgatatccatgctcaacatggagagaatttccaccatctccacgccgcgccatagcaggagatcggcctgcggatgcccctgcgttttctctcgacaataatcccaggtttcggctaagcgttcacacgactgctggctggaaattcccagactcgcgatccatttcttcgggtcaaattcaccagctttatttaaatgtgcacttcttaccgcaaccattgtcctctccttaagggaccgcctgccgaagtcggcaagcctcaacttttacacttcatccttcaaaccgcgccaacgctggcgttcgtcttttatctcagtcacctgcttctgaggatgccgcttcactgcgatttgaatgattcttgtgctcaaacaacaccattgattccagatgtccggtatgcgggaacatatcgagcatcgccaggcgttgaatggtatatcccgcctgcaataaaacgtcgctatcgcgcgccagggtcgccgggttacatgaaacatacaccacccgacgcggcgctaattttataatatgtaacataacgcccgccgcgccggcgcgcgccgggtcgagcaagaccttatcaaaaccgtgcttcgcccacgcctggcgggtaacgtcctcttccaggttctcatggaagaaagtcacattatgcaacccgttcaacgccgcgttctcctggcccttcgccaccagcgcgggaaccccttcaacgccaaccacctgcgccgcacgcttcgccagcggcagggtaaagttgcccatgccgcaaaagaggtccagcacgcgatcctgaggctggatatccagccattccagcgccgtgcgcaccatcagctggtttacgccatcgttcacctggataaaatcgcgcggactgaacactaagcgtagaccgtccgaggtataccagggggcttccccgcgaatatgttccagtatctcgctttgcggggcgaggtacagggaaagaccgtgagattgcgaaaaacgttccagcttttctttatctgccgcgggaagcgccgccgtatggcgcaataccatcagcgggccgttatccgcctgcaccagctcaacgtggccaagctgacgcaccgatttcaattcgctaagacattcacgtaccgcaggcaataacgcaccaagagtgggcaccaaaacggggcactgcaccacatcgacgatctcgctggcgttagccttgcggaagcccatctgtaattgttgggactttggctgataattcaagctcagacgcgcccggcggcgatagccccacggcgaagcggctataatgtcatcaacgtcgcgcttcatcagcctcgcgagcgcggcgcgtttgctctgctgctgcagctcaatgctggcgtgctgctgctggcacccgccgcagatgccaaaatgcgggcagcgcggcgcctgccgctgcgggctatcgctaagacggcgtttaacctgggcgcgggcgtactgctttttatcttcgaccacaacaacgtcagcctgctcctgtggcaataaaccgctgataaacagcgccttaccctgatgacgcgcaacgccctggccgaaggggtcaaggtcatttactgtaacggttatgatctggcgcgtcgtcacacgccgttttgcagagtagaattgcgccatcgtagagatttgtctcaattaaatatactgactctggataagagttcggtcaggatgagccagagtaacaacgcactagcctcctgaaagatgatgtgtatattctcccataatggaaccgcatgaccaactacagccttcgtgcccgcatgatgattcttattctggcgcctaccgttctgatcggtctgctgctcagtattttcttcgtcgcacaccgctataacgacctacagcgccagctggaggatgctggcgccagtattatcgaaccgctggcggtctccagtgaatatggcatgaatttgcaaaaccgcgagtcaatcgggcagctcatcagcgtgctgcaccgccgccactccgatattgtgcgcgccatttccatctacgactcgcacaacaggctgtttgtcacctctaactttcagctcgatcccggcgaacttcagctgccaaaaggggaaccctttccccgccgcctgagcgtggtgcgccacggcgatttgatgattttgcgtacccctattatctcggaaagctattcaccggatgaatcgccgggaagcgatgccaagatgccggacaatatgctgggctacgtggcgcttgagatggatctcaaatcggtgcggctacagcagtacaaagagatctttatctccagcgtgatgatgctgttctgtatcggtattgcgctgatcttcggctggcggctgatgcgcgacgtgaccgggccgatccgcaatatggtgaataccgttgaccgcatccgccggggccagcttgatagccgcgtcgaaggctttatgctcggcgagctggatatgctgaaaaacggtatcaactccatggccatgtcgctggcggcctaccacgaagagatgcagcataacgtcgatcaggcgacatcggatctgcgggaaacgcttgaacagatggaaatccagaacgtcgagctggacctggcgaaaaaacgcgcgcaggaagcggcgcgaatcaaatccgaattcctcgccaatatgtctcatgaactgcgcaccccgctcaacggcgtcattggctttacccgcctgacgctgaagaccgacttaaacaccacccagcgcgatcacctgacgaccattgagcgttccgcgaataatctgctggccatcattaacgatgttctggacttctctaagctcgaagccgggaagcttattctggagagtattccgttcctgctgcgcacttcgctggacgaggtggtcacgctgctggcgcactcggcgcacgataaggggctggagctgacgctgaatatcaaaaacgatgtgccggataacgtcattggcgacccgctgcgcctgcagcaaattattaccaacctgatgggcaacgccattaagtttaccgaacacggcaatatcgacgtgctggtggaacagcgcgccatcagcaactcaagggtacaaattgaagtccagatccacgataccggtatcgggattcctgaacgcgatcagtcgcgtctgttccaggcgttccgccaggccgacgccagcatctcccgtcgccacggcggaaccggacttgggctggtcatcacccagcggctggtgaaagagatgggcggcgatatctccttccatagccagcctaatcgcggctcgacgttctggttccatatcagccttgacctcaaccccaacgcggttcccgacagcgtgccaacccagtgcctggcgggtaaaaagctggcctatatcgaggccaacgcggcggcggcgcagtgtacgatggagctactggcgacaacgccgctggaggtggtttacagtccgacgatgaccgccctaccggatgctcactacgatatcctgctggccggcattcccgtatcaatacgtgacctgagccagcatcgcgataagctggaaagagccagcaagcttgccgatcacctggtgctggccctgccgtgccacgcccaggtcagcgccgaaacgctgcgtcaggacggcattgccgcctgtttgcttaagccactgacctcaacgcgcttactgccggcgctgacggcctcctgccagacgcagccgacggttctgccgccgcgttccgatagtaagaagcttccgatgacggtcatggccgttgatgacaatccggcgaatctcaagcttatcggcgccctgctggaggatttagtccagcacgttatcctctgcgacagcggccagcacgccgtcgagcgggccagagaaacgcagcaggatctgattctgatggatattcagatgccggagatggatgggatccgcgcctgcgaactgattcaccagctccctcatcagcagcaaacgccggtgatcgccgtgaccgcccacgccctggaagggcagcgagagaaattactcagcgcggggatgaacgactatctggcgaaacccattgaggaggataagctctacagcctgctgctgcgctacaagccgggaaagacgctaccgccgcaggtcgccgcggagcctgttgagccgcccgttaaccatgacatcaccctcgactggcagctggcgctgcgtcaggcggcgatgaaaccagatctggcgcgggaaatgctgcagatgctgctcgcctttatgccggaggtgcgtaacaaggtagaagaacagctggtgggagagcagccggaaggcctgctggatctcattcataagcttcacggcagctgtagctatagcggcgtgccgcggctgaaaaaactgtgtcacacccttgagagccagctacgcgcgggcaccgccgccgaggagatggagccggagtttctggagctgctggatgaaatggacaacgtcgcgcgcgaagcctgtaagctgttggggatttagaggatgtaaaacgcgagccccggtctgcgcttcgcgaccggggaaaaacctataatagccggcccattttcagcacggcggcgacgtttctcgccgtcatacgtacgttttcggcggcattttccagtgcttgctccagggtgcaaacggaataaatcacgctgaataccgcatccaggccgtgctgatgcacgacgccgacgtcagccgtcaggctcccggcaatgccgatgaccggcaggttgtagcgttttgccaccctcgccacgccaaccggcactttgccgtgaaccgtctggctatcgatacgcccttcgccggtgatcaccaggtccgcatccgccacgatatcggcaagatggagcgcatcggtcacaatctcaatgcccggccgcagctttgcgccgcaaaaggcgtacaggcccgcgcccattccccccgccgcgccgccgccttcaagatgcagcacatcaagttctaaatcgcgatggataatatcggcaaaatgggccagcgcgttgtcaaggcaggggatcatctccgccgtcgcccctttctgcggcccaaataccgccgtcgcgccctgtggtcccgtcagcgggttggtaacatcgcaagcgacgtcaatacgacagccggccaggcgtttatcaagttcgctaacgtcgatgcgcgcgaggctctccagcgcgcgtccgccggcggcaatctgctggttatctttggtcagcagtttcgcccccagcgcctgcaccatcccggcgccgccgtcgttcgtcgcgctgccgccgatgccgataataatttgcctcactccggcatccagcgcatggcgaatcagctcgccggtcccccatgaagtggtcagcaaaggatttcgccgcgccggcggtacgctctccaggccgcttgccgccgccatttcaataaacgcgcactgcctatcgcccgacaggccatagaaggcctccacgggttcaccgagcggaccggtgacggtgaccgcaatccggcatccctgggtcgcggcaaccatggcttcaacggttccttcgccaccgtcggcaaccggcagcttgacgtactccgcatcggcgtaaatttcccgaaaaccttgttctatcgcggttgcgacatccagcgcactcaggctctccttgtatgaatccggtgcgatcactatcttcatatgctgtccttaaaatgaacgattacccgacgccgtgcaggaaaccggtccccgaagggaccggtatttctttagcgcaccatgcacggacgcttgttatcaaacgtccagttcgggatcaaatactgcatgcccatcgcgtcatcgcgcgcgcccaggccgtgtttctggtacagctcatgagctttcatcacccgatccatatcgagctccacgcccagacccggtttcgccggtacctgtaccatcccgcctttaatttcaaagggctctttggtcagacgctggttaccctcctgccagatccagtgggtgtcgatggcggtaattttacccggcgctgccgctgccacgtgggtaaacatcgccagcgagatatcaaagtggttgttagagtgcgagccccaggtcaggccaaactcgtggcacatctgcgccacgcggacggaaccctgcatggtccagaagtgcggatccgccagcgggatatcgacggactgcagcgacagcgtgtggcccatctgacgccagtcggtcgcgatcatattggtcgccgtcggcaggccggtggcgcggcggaactccgccatcacttcgcgtccggagaagccctgttctgcgccgcacggatcttccgcataggccagagagcctttcaggtatttgccaattttgatcgcttcatccagcgaccacgcgccgttcggatcgagggtcacgcgcgcctgcgggaagcgcttcgccagcgcaacgatggactccgcttcctcttccccggccagtacgccgcctttcagtttaaagtcattaaagccatatttctcatacgccgcttccgccaggcgcaccaccgcatccggggtcatcgcttcatcatgacgcaggcgataccagtcgcatttgtcatcgggctggctctgatacggcagcggcgtggctttacggttgccgacgaagaacaggtagccgagcatttccacttcgctgcgctgttggccatcgcccagcagagacgccacgttcacgcccagatgctggcccagcaggtcaagcatcgccgcttcgatcccggtcactacgtgaattgtggtacgcagatcgaaggtctgcaaaccgcgtccaccggcgtcgcggtcggcgaaagtattgcgcacggcggtcagcacgtttttatattcacccagcgtcttaccgaccaccagcgggatcgcgtcctccagggtggtgcggattttctctccgccggggatttcaccgacgccggtatggccggaattatctttgatcaccacaatattgcgcgtgaagaacggggcgtgcgcgccgctcaggttcatcagcatgctgtcgtggcccgcgaccggaatgacctgcatagaagaaacaacgggggtcgaaaattgtgcgctcataatttagtccttattcaaatcagtgacggccgaaaacggggcgtttacggtcaaaagtccatccggggatcaggtactgcattgggcctgcgtcattacgcgcgccgccgggcagctttttatacgcctcatgcgctttctgtacctgctcccagtccagctcaacgccaagtcctggcgcgtccggaacagcaatttttccgtgcttaatctccagcggatttttggtcagacggcaatctccctcctgccaaatccagtgggtatcgatggccgtggggttacccggcgccgccgcgccgacgtgggtgaacatggccagtgaaatatcaaagtggttattggaatggcagccccaggtcaggccccagtcatcgcacagctgcgccacgcgcaccgcgccggacagggtccagaagtgcggatcggccagcggaatatccacggcgttcagcatcaccgcatggcccatttcgcgccagttggtggcgatcatgttagtagccaccggcaaaccggtggcgcggcggaattccgccatcacttcgcggccggaaaagccctgctcggcgccgcaggggtcttcggcgtaggtcagcacatcgttcagccctttgcacagggcgatggcttcatccagcagccaggcgccgtttgggtcgaccgtaatgcgcgcatccgggaaacgcttcttcagcgcgcgggcggtttcgatctcctgctcgccgggcagcacgccgcccttgagtttgaaatctttaaagccgtagcgatcctgcgcggcttccgccagccgcaccaccgcctcgctgttcagcgcttcctgatgacgcaggcgataccacgcgtggctgcccggcgtgctttccagatagggcagatcggtcttcgtacgatcgcccacgtagaacaggtagcccagcacggtcaccgcatcgcgctgcttgcccggccccagcagttcgcaaaccggcacgttgagcgccttgcccaacagatccagcagcgcagcctccagcgccgccaccgcgttcacccgcagttcgaacgtccaggcgcctttaccaaaggtgtcgaaatccgcggcctggttgcctttatgcacctgctgaaccactttattcaggcgggcgatttcctgccccaaaaccatcgggatcgcctccaccagcgtctgataaatcacctcgccgccgggcgcttcgccgacgccggtattgccggcgctgtcggtcagcaccacgatattacgggtaaagtacgcgttatgggcaccgccgatattgagcagcatactgtcctgcccggccaccgggataaccttcatgtccgtgataacggggctcgattgcgttgtcatgatgattgtcctgccacaggtttcagttcaatacgcttaatatcgccgaccagaaccagatagctcagcaccgccaccagcgcatggacgcccacataaatcagcgcgccgttaaacgaaccggtggtgccaacgatgtagccaatcgcaatcggcgtcacgatgccggagatattgccgaacatgttgaacagaccgccgctcagcccgctgatctctttcggtgccgtatccgccatgaccgcccagcccagcgcgccgatgcctttaccgaagaaggccagcgccataaagccgatgatcatccactccacgttgacgtagttacagaacaccatcaccatcgacagcagcatccccatcacgatcggcgttttacgcgcgatgttcagcgagccggtacgacgcatcagccagtcggaaataatcccgccgagcacgccgcccgcgaagccgcagatagccggcaccgaagcgacaaaaccggctttcagaatggacatgccgcgcgcctgcaccagataaaccgggaaccaggtgataaagaaataggttaaagcgttaatgcagtactgtccgatatagacgccaatcatcatgcgggagcccagcagctgcttaatttgcccccattttacgctaaacggcaccttggctttggccgccgcctgatccatgttgatcagcgcgccgcctgcggcgatgtaatccagctctttttggttcacgcccggatgctggttgggttcatgaatgaccttcagccagacaaagctgatgataatcccgagtccgcccataaagaagaacacgtgcgaccagcccacctcatgggtcagccaacccatgattggcgcaaaaataacggtggcaaagtattgcgcggagttaaagatagccaccgcggtgcccctctcctgcgccgggaaccacgccgcgacgatacggctgtttccggggaaagatggcgcttcggccaggccgacaaggaaacgcagggtaaacagcgcgacgataatgccgaagccgctgaagatatcgacgaagccctgcagcagggtaaacatggaccagataaaaatggaccagaagtagacgcgttttgaaccgaaacggtcaagcagccaaccgcccgggatttggccgatcacataggcccatgaaaacgcggagaaaacataccccatgccaacggcgtcaagaccaatatctttggccatctccgatccggcaatggataaggtggcgcggtcgccgtagttgaaggatgtgacgataaacagcatcaccactatccagtagcgagcattggtgcgcttttcagcgccgctcgccgcctgacttaatgaactcattgttgcactcctgaatcatagcgttagctacgttcattctgaacagcacaacctgtagggtactcagaatgacgtgttagtgtttttcattgttttcgttatatctggcactgcattgggaactggcagggaaagtataaaaagaggggctggcgggctcaccgtgcaaatacacagctttcaccggctgagtaaatgtgatttatggcgtatgcctaatgagatgggggatggttcacggaaatgaaaaaccgcgcgcgttcagaggcggaaacggcggtgcaaaaggcaggagtgtgaatcaactctcttgaccccgtgaaatagcccggtaaaggccctggcattacacaggttttaaggcaaatgcccgaagccagccacgtggagaattggtacgatctttttgaccgttaatctggctctggcattgaacatcagtaaaaaaggagcgccctctagtgtagggagagggcgaaactttttaatcgagcagcgacgcccactgcgtgacccacgggttagagacgctttcgggttccggatcttcgctggcgtcaatcatcagcatctcgccaacgcgcgtgccgccctgttcttgcaataacgcatcaaactttaggccgccgccgcagaagttagcgtaggtgctatcgcccagggcgataatcccatagcgtaaatgcggctgatacatatctttgatgccttcgtacaagggcacgatactgtccggtaaatcgccctgtccggtggtcgatgtcaccaccagcacatatctaccgctatacgactcccagtctttgacctcgggatcctcaaagactttcgcctgatgccccagcccgctcaaaatagcctgcgcctcttcggcgaccaggagcgaatttccatacatcgtgccgacaaaaattccgacttctgccatgactatctccctgaattgacctgtatctcttcatcctgaccgcagtcgtcggcaaactcaaccctttcatttagcgggagaaggccgcgccagccaaactgcgacagcgcgcgcatccagacgtcgtcaagaccggcgcgaataaccaacggttcgccggtaaagggatgcgttaacgagagctggctggcgtgcagcatcagccgatcgcagccaaagtgcgccgccgcgctgcgattctgccgcaaatcgccgtgtttgctatcgccgataatcggatggcgaagatgggcaagatggcgacgtagctggtgtttacgtccggttttcggttccagctccaccaggctatagcgggtcgtggggtaacggccggtcgccaccggcatctctaccgtcgccaggccgcgataatgcgtcaccgccggctgcgggtctttattttcgcgggcaaacttatcggcgattttatccagttcctcaaccagcgggtaatcaagcaccgcttcgtcgttcagccagccgcgagcgatcgcatgatagcgtttctgcatttgatgctgctcgaactgctgcgacagcaatcttcccgcttcgctcgacagccccatcagcagcacgccggacgtcggcctgtcgaggcgatgggcggtgaacacgtgctggcctatctggtcgcgcacggtctgcatcaccaccactttttcatcacgatccagccagctgcggtgcaccagccagcccgatggcttgttcaccgcgaccagccactggtcctgatataaaatctccagcatcaggcttcgccgccggcaaacagcgcatccagcaggaccagttcggccagcacccgctcgcgcacggggtgagcattatccagagccatctcataatagggcgcaacggcgaagttctgcggcagcggcgttccgctttccagaagctggtgcatacgcggaatcaatacccactgcagccattcaagcggctccatggtgtcgaggcaaaacggctgttcgctggcaaacgcgcggctatcgggagcactatcctgccagtgttccgtttcgcgcagcagcgcttcaatggcgagcaggcgctcgcgcacgcgatggtcaagagtcatgggaaacctcggtgagttaaaaaccggcgcagaatagcaaattcagacgagaaataaaaaaagggagcactgtataaaacagtgctcccggttcgttttgcagcaatccagctacattggtgctccctgctcgtccttgaaaacttttcctgaggtctcctgaccatgttcatccataaacagttgcatcctgctttcacaccaccccgatgcgaaataactcatccttaagtctgtcctgatcttcctgatccaccgaacgtcccgctcggctctcgttctccttcctggaggtgtccttttacgcaatcctgcgttatcctgtgcttcatcctgaagcctgtccttgcaacgccatcctggcgggtcctgcagaagcgtcatcatcctgatgttcacttcgtttatcaactccctgtcgatgtgtatagaatccctgattccgccctgtcttacaacccttgttaagacaatatcttaagattaatcgtcagtatccttaatgagaaaatcattaatcacttgaaaaatattatatttcttaaaatacgccccctgaaggatcggcttaaatgatgacgatctcttacaggtcttgtaagagatctctcacaaaagtttgggtagtgtggattacagaactggcttaagggaattaaggaaactcgcaagcgagggagaaagggtcgtccgttttcgggtgccgagggtctctttgatcacttcaccgctcatattacagaccgaaatgacctccagttcgctgtccagcgtggcgataaacagcgtgggcgacagcttcaaacgcttttgcaccagcagatgaccaatcagattctcctgcacccgctggaaatcatccgggctccaggtttgcagcagcgtcatggtttcatcggctgtttcatcggcaaaacgcgcctgcatatcgccggcaaactgagtggtataataagcatgaagcggttgttgtaccacaatctccagcgcccgttcaaccgcgtcaatattttgtgctaatgaaaacggctgcggctgccagaaaacgccgtcatcatccgtgccattgacgcacggcgacgggataccgtaaagctcttcgctgcgcggcaggctggagcgctgctgctgccacgcctcacaataacgttgggtaaatgcttgtagcgcttctgcggtttgctggtccaccggtttctctcttcacgttagacaggatacacttggcatatagtgtaaccgctttaactatggtgaaacatgtcttcttacgataatcatcaggcgctggccggcctgacgctcggaaaatcaaccgattaccgcgatacctacgacgccagcctgcttcagggcgtcccgcgcagcctgaaccgcgacccgctggatctgcacgccgataacctgccgtttcacggtgccgatatctggacgctgtatgagctctcctggctgaacgccaaaggcctgccgcaggtcgccgtgggccacgtggagctcagcgataccaccgtaaacctggtggaatcaaaaagctttaagctctatctcaacagcttcaaccagacgcgctttgccgactggcaggcggtcgaggcgacgctggcgcgcgatctcagcgcctgtgcgcaaggagaagtgaaggtagcgctgtatcgcctcgatgagctcgaaggccagccggtcgctcatctgcacggcacctgcatcgacgaccaggatattgaaatcgataattaccagttcagcgccgattacctgcaggacgccgcggccggcaaagtggtcgaagagaccctggtcagccatctgctgaagtccaactgcctgattacccaccagccagactgggggtcggtgcaaatccagtatcgcggggcgaaaatcgatcgcgaaaagctgctgcgctatctggtgtcattccgccaccacaacgagttccacgagcagtgcgtagagcgcatcttcaatgacattcagcgtttctgccagccggaagccctttccgtttatgcgcgctacacgcgacgaggcggtcttgatatcaacccatggcgcagcaataccgattttgtgccggccaccggtcgcctcgcccgtcaatagtaaacattttcacaatttgcgcgcgttaacccgcgcgcaaggttgtgaaaacgccatcagcagggctattgtaatcacaggaagacgataatcgtcctgtaaggagttcacttgattacacatgttagcccgcttggttcaatggatatgctgtcgcagctggaagtggatatgcttaaacgcaccgccagcagtgacctgtatcaactctttcgcaactgctcacttgctgtgctcaactcggggagcctgaccgataacagcaaggagcttctgtctcgttttgaaaacttcgatattaacgtgctgcgtcgcgaacgcggcgtgaagctggaactgatcaacccgccggaagacgctttcgttgacgggcgtattatccgttccctgcaggccaacctgtttgccgtactgcgcgatatcctgttcgtctacggccagatccacaataccgttcgcttcccgaatctcgatcttgaaagctcggtacatatcaccaacctggtattctccattttgcgtaacgcccgcgccctgcacgtcggcgaagcgccaaacatgattgtctgctggggcggccactcgattaacgaaaacgaatatctgtacgcccgccgcgtcggcacccagctgggcctgcgcgaactgaatatctgtaccggctgtggaccgggcgcgatggaagcaccgatgaaaggcgccgccgtcggccacgcgcagcagcgttacagagacagccgctttatcggtatgaccgagccgtcgattatcgccgccgagccgccgaacccgctggtgaacgaactgatcatcatgccggatatcgaaaaacgcctggaggcattcgtgcgcatcgcccacggcatcatcatcttcccgggcggcgtgggcacggcggaagagctgctctatctgctgggcattttgatgcacccttcgaacaagtcgcaggttctgccgctgattctcaccgggccaaaagagagcgccgattatttccgcgtgctggatgagtttatcgtccatacgctgggtgaagccgcccgtcgtcactatcgcattatcgttgacgacgccgcggaagtggcccggcagatgaaaaaagcgatgccgatggtgaaagagaatcgccgcgagaccggcgacgcctacagcttcaactggtcgatgcgcattgcgccggacctgcagatgccattcgatccgacccatgagaatatggccaatcttaagctctatccggaccagccggtggaagtgctggcagcggatctccgccgcgccttctccggtatcgtcgccggtaacgttaaagaggtgggtatccaggctatcgagaaattcggcccgtataagattcacggcgacccggcaatgatgcgccgcatggacgatctgctgcagggctttgtggcgcagcatcgtatgaagctgccgggcggcaccgcttacatcccctgctacgaaatctgttcctgagttctcttctgctcttctcccgggcggcggcttacgcccccgggctatttctccccgcccgggccgcactctttctccgctttttcgcttctccattcgcccgtatgctttccagataaatcattccttttatgaatttttagcatcgcctttacaaaagccaatcgtttgcgtttccaaaaactgcaataaatatcaccaggaaaaacgccttttaacgtaaaaacgtcgagaacttcgcatttttacagtaaaaacctcgttattacgtcgcgccactattctctcatatgctgaaaatgatagcctccgcgccacaaatctctggctgatcaccagaaacaggctgttggactaaaattgcttacatttaaagtggattattgcatttgagatcgcgatcactgatgcattcaccatataaatgtatcttcccgcaccaattgttacggagaaaatgcctaaaaaaccgtaaacaaacgaatttcatattatttggtcttttttattcaatagattttgttgcttcctccaggagatacagatggaaaccactcaaaccagcaccatcgtttcggatgctacccgtagcggttggcgtaagacggacaccatgtggatgctgggcctgtacggcacggctatcggcgcgggcgtcctgtttctgccgatcaacgccggcgtcggcggcatgatcccgctgatcatcatggcgattctggccttcccgatgaccttcttcgcccaccgcgggatgacccgtttcgtgctgtccggtaagaatccgggcgaagacatcactgaagtggtcgaagagcatttcggcgttggcgcaggtaagctgattaccctgctctacttcttcgccatctacccgattctgctggtctacagcgtggcgatcaccaacaccgtggaaagctttatgctgcaccagctgcacataacgccgccgcctcgcgccattctttccctgattctgattgtcggcatgatgaccatcgtgcgcttcggcgagcagatgattgtgaaagcgatgagcgtgctggtgttcccgttcgtggtcgcgctgatgattctggccttttatctgatcccgcagtggaacggcgcggcgctggaaaccctctccctgagcagcgcgaccgcgaccggcaacggcctgtggatgaccctgtggctggcgattccggtaatggtgttttcttttaaccactcgccgatcatctcctccttcgccgtcgcgaaacgcgaagagtacggccagggcgcagagaaaaaatgctccagcattctggcccgcgcgcacatcatgatggtgctgaccgtcatgttcttcgtcttcagctgcgtactgagcctctccccggcggatctggcggcggcgaaagatcagaacatctcgattctgtcttacctggcgaaccactttaacgcgccgatcatcgcctggatggcgccgatcattgcgatgatcgccatcactaaatccttccttggccactacctgggcgctcgcgaaggctttaacggcatggtgattaaatccctgcgcggtaaaggcaagtccatcgaaatcaataaactgaacaaaatcaccgccctgttcatgctggtcaccacctggattgtggcgacgctgaaccccagcatcctcgggatgatcgaaaccctgggcggcccgattatcgcgatgattctgttcctgatgccgatgtacgcgattcagaaagtcccggcgatgcgtaaatacagcggccacgtcagcaacgttttcgtggtgattatgggcctgattgctatctccgcgattttctactctctgtttagttaatatcccccgcgccgcctgacggcggcgctcccgacagcactggatgcatcatgatcagcgtattcgatatttttaaaatcggcattggcccttccagctcccacaccgttggaccgatgaaagcgggcaaacaattcacggacgatcttattgagcgcgggctgctttccgaggtaaccaaagtcgtcgtcgatgtctacggctccctttccctgacgggaaaaggccaccataccgatatcgcgattattatgggcctggcgggcaacctgccggataccgtcgacatcgacgcgattcccggctttatccaggacgtcaacacccatggccgcctgatgctggcaaatggccagcaggaagtggcgttcccggtcgatcggtgcatgaatttccacgccgacaacctgtcgcggcatgaaaacggcatgcgtattaccgccctcggcggcgagaaggttctctacagccagacgtattactccatcggcggcgggtttatcgtcgatgaagaccatttcggcgtgacccgcgaggcgccggtcgccgtaccttatccgtataaaaacgccgccgatctgcagcgccactgccgcgaaagcgggctatcgctctccggtctgatgatgcaaaacgagctggcgctgcacagtaaagaagcgctggagcagcattttgccgcggtctgggaagtgatgagcagcggaattgagcgcggcatcaccaccgagggggttctgccgggcaagctgcgggtgccgcgtcgcgccgccgcgctgcgccggatgctggtaagccaggacaacaccaacagcgacccgatggcggtcgttgactggattaacatgttcgccctggcggttaacgaagagaacgccgccggcggacgcgtcgtgaccgcgccgaccaacggcgcctgcggtatcgtacctgcggtgctggcctactacgacaagttcatccgcaaagtgaacgccaactcgctggcgcgctacatgctggtcaccagcgccattggctcgctctataagatgaacgcctcgatttccggcgccgaagtgggctgccagggtgaagtcggcgtagcctgttcaatggcggcggccggtctggctgaactgcttggcggcagtccgggtcaggtatgcatcgcggcggaaattggtatggagcacaacctcggtctcacctgcgatccggttgccggccaggtgcaggtgccgtgcatcgagcgtaacgctatcgcagcggtcaaggcggtcaacgccgcgcgtatggccctgcgccgcaccagcgagccgcgggtgtgcctcgataaagtcatcgagaccatgtacgaaacgggcaaagatatgaacgccaaatatcgtgaaacctcgcgcggcggcctggcaatgaagattgtcgcctgcgattaacgcccccctcccggtatgctgcggcatgccgggcttcttttccctgccctcctccttcatttatgttatataaatgataatttagttatttattagttataaagacgatttgttaccttacggaaacaccgctcaaggagaacaaatcatgctcagattatcccgcccagcgctgctgctactgctggcaggcttatccgcttccgcgctggcgaaagcgccggagaccgtgaatatcggttatcagaaagctaatatcttcgcgctgcttaaatatcgcggcaccctcgatgaaagcttcaaaaagcagggtatcgccgtccgctggattgaatttcccgccgggccgcagatgctggaagggctgaacgtcggcagcatcgacctcgccgccaccggcgatgcgccgccggcctttgctcaggcggcgcaggcggatctggtctatttagcccactccccggcgaacccaaaaaccgaggccatcgtggtggcggaaaactcggcaattaagagcgtggccgatcttaagggcaagcgcgtggggctcaataaaggctccgacgtaaactacctgctggtgaccgcgctggagaaagccgggctgagctataaagatatcacgccggtctatctgccgcctgctgacgcccgcgccgccttccagcgcggcgctattgacgcctgggttatctgggatccgttcctcgccgaagtggaaacgaacgccaaagcgcgacagattggcaatgccgaagggctggtgccgcactacaccttctacctggccagccgcaaatttgccgacacctatccggataccgcaaagcaggtggtggatgagctgggtaaactgagcgaatgggccaacagtcatcaggacgatgccgccgggatcctctccacctcaaccgggctggataaggctatctggctgaagacgctggcgcgtctgccttatggtgccgagcgtatgacgcctgcggtctataacgaacagcaggcgctggcggataccttcacccgtatcggcctgctgccggtgaaagtcgatgttcgcagcgcgacctggtcgctggataagcagtaagtcttcccttcccgggtcgcggcgcaggcgccttacccgggctaccggcccgcagacggcggtggatccgtagcccggacaggcgcgtcaagcgccgcctccgggaaaaacctcccgccccacagttcagcccctcacccttcggggagagagggaccggcaaaattaactcaccttctcttcacttccgaccgcgacctgcgcgccgtagcgatagcctgcgcccggatgcggcgcagccagccgcgggccggcgccaaacagcttctcgcgcagggttccctcgcgatactcctgcttaaacacgccgcgcttttgcagctcagggaccagcaaatccaccacgtcgcggaaggtttcgtgggtcaccgcataggcgaggttaaacccatcgacgtcggtctcttcgacccaggactgcagctcatcggcgaccgtctgcgggctgccgaccaccagcggcccgaagccgccgatccccgcccagtccgccagcttctgcacggtccactggctgttcggatcggcggtggaaaacgcctctaccatcgactgaatcgcgttggtatgcagatactccagcacctgatccggctgatactgaccaaggtcgatgccggtccagccggagagcagagccagcgccccttcgtagctgacgtacggtttatactcctgccatttagcctgggcttcacggtcggtttcgccgacgatgaccgtctgcatattgaagatcaggatgctgcgcggatcgcgcccggcctcctcggcgcgacggcgaatatccgccaccgtctttttcagcagcactttcgacggcgcgccgacaaatacgcactccgcgtggccggcggcgaactgcttgccgcggctggaggcgcccgcctgatagagtaccggcgtacgctgcggcgacggctcgcagaggtggatccccggcaccgagaagaagttcccctgatggttaatcgggtgaatttttcgcggatcgctgaagatcttacgttccctgtcgcgcagcaccgcgccatcctcccagctcccctccagcagcttatagaccacctccagatattcatcggcgtagtcgtagcgggcgtcgtggtcggtctgcgctttctggccaatattacgcgccccgctctcaaggtaggaggtcacgatattccagcccactcgacccttggtcagatggtcgagggttgaaagacggcgggcgaacggatagggatgctcaaaagagagcgaagcggtcaggccgaatcccagatgctccgtcaccagcgccatcggcgtaatcagcgccagcggatcgttgaccggcacctgcgccgcctggcggatcgccgcatcgccgttaccgttcagtacgtcatagacgcccagcacatcggcgataaatagcccgtcaaacttgccccgctccagcagacgcgccaggtcgacccaatactcgaggtctttatactgccaggagcggtcgcgcggatgggcccacagccccggcgactgatggccgacgcagttcatatcaaaagcgttcagacgaatttcacgttgtgatgacatagcactctccacggcgcgccccgctgtcgggacgcgcgcataatcattaaaggaatcaggggataaaaggcgttcagaacgccggacatcgggcggattgtttgacgcccagggtccgcagcgcttcgtcggccacggcggcggcatggtcggccacctgcggcagccccattaattctccgaaatacgcccgcgcggcgggtccggaaaccagcagattgggcgtaatccgcccttcccggcctatcgcccgcgagcggggatcgacgtccaggccaaggccgaacgcatcggcgcgaatcagcccacgctggctcagctgacgcagcagcggctggctgtcggtcaacccgccgtacgccgggccggtggttaaaataaagtggtcagcgctcacccgcagcgtttcaccgcgccggggcgtcagggttagcgccagcttttgcgcgtcgccttccagcgccgtcagcctggccgccagcacccgcaggctgccgtcgcgctggcgctgctcaaggaccccggcgacctgcggagcgatacggtagcggtgaacgtcccagtagctgcgcaaatgacgcaggaagcgctggcgatcggccaccgtcagcccctgccagatgctctgcccctgattacgcaccgcgtccagcaccacctgccaggcctgtccctgctccgccgcgcgctcgatatccagacggatttgccgcagccgctggcgcagcgttccgcaatcgtattcgccaggccagggttcactactgccgctgaggttgctgcgggacagcagcccgcggcgtgaaaatgccgcgatcggcccccgatggcccagacgcgtcagggtcgcgacggtgtccgccatcgtcaggcaggtgcccatgaccgcgacgctcgcttccggggcgatagttgccagcacgcccgctcgccaggggttagcgatgagcgccggatgcgttacgaacggcgtcgccagcgacggcagcgacggcggcggatggctgatggccagcaccagcagatcggcctgcagccgacgcccgccgtcggtgacaacttcaccatgattaacgctcagcgcctgctcgcgcagatgcgtcagccgcccgccgctggcgcgcgcctcctcggcgaaacgctgggcgacatagcggccaaactgaccgcgctgcggatagaccgcgccgtctgccagcagggcatgcgggtcatccgcaaaggcgggctggctgcggtaccagcgatcgaacgcgccctcctcttcaccggcgagctgcatccgcgcggcgggaacattaatccgatggctcggttcggttgtggagtaggccacgcccgcgccgggcacctcgcgcggctccagcagcgtgacccgcacgccaaccggcgccaggcgcaggagatgaatcgccaccgccgcaccgctaaatccgccgccgacaatcaccacgtgcggttcagtttgcatagcccaccgccttcacaaatcggtgtaacatacgcgcctcctcagcttgcgctgacctgtttcaccggacgcttatcgccgccgatggtttcgccaaacgggccggtattgacgctacgcgccttcggctgatcgtggcctgccagcggcaatagcggcatgaccaggtcagcgaaacgatgggcttcttccagatgcgggtagccggagaagataaagttggtgataccgagcgcctgatattcacgaatgcgttctgccacctgctgcggattgccgaccagcgccgtcccggccccgccgcgcaccagtcccacgcccgcccacaggttcggcgcaatacgcagattgtcgcgcgatcctttatgcagcgaactcattcgcgcctggcctgtggagtccatacgggcaaaaattttctgcgcctgggcgatagtttcgtcatcaaggtgtgaaatcagccgatcggcggcggcccacgcctcctcttcggtttcgcgaacaatcacatgcagacgaatcccgtactgcaacgtgcggccccgggcggcggcgcgctcgcgcactatcgccagcttttcggccaccagcgccggcggctccccccaggtcaggtaggtatcgatttgatcggcggcgacgtcgatggcttcctcagaggagccgccaaaaaacagcggcgggccgttttcctgtaccggcggaaacagcacttccgcgccttccacgtggatatgctcgccgtgataatccaccttttcacctttcagcaggcgcgagtagacgtcgagaaattcgcgggtgacctgatagcgttcgccgtggctgaggaaaataccgtcgcctttgttctccaccggatcgccgccggtcaccacgttaatcagcagccgaccgcccgacaggcggtcgagcgtcgtcgccatcctcgccgccagcgtcggcggctgcaggcccggacgaacggccaccagatagcgcaggcggcgggtcaacggcgccagcgccgaggccaccagccaggagtcttcgcagcttttccccgttgggatcagcacgccgtagtagccgaggctatcggccgccagcgccacctgctgcaggtaaggcaaatcaaccgggcgtccgccctccgaggtgcccaggtagcggccatcgccgtgggtgggcagaaaccagaacacgttgattttatcgtcggttttttgcgtcattatccatttcctatataaccatatccgatatttatcgaagagttgttttaatttggttatatgagtgttagcgataatcgtgccaatggtgaataaaaaattaacaatataaattcagtgagttacaaaaaaccgaaccttacgccgctgttgcaaatgccgcagccaatgcgtccggactgcggcatttgcaacagaccggcgagttagccctctggtttccgtccccggcacaggataacttcagggcatcaaataccggaggtcaccatgctgaatcctgaatttccatcctctacgcccgcgctgatcgacccggcgtcaaaagcgtttcagagcctgctggataaactggcccccaccgaggcgaccgtgctgattgtcggcgaaaccggcaccggtaaggaggtcgtcgcccgctacctgcatcaccatagcccgcgccgccaccggccgtttctggccgtcaactgcggcgcgctcagcgaaagcctggcggaagcggagctgttcggccatgaaaaaggggcgtttaccggcgcggtacaaggccatcccggctggttcgaggcggcggagggcggcaccctgctgctcgatgaaatcggcgagcttagcctgccgcttcaggtcaaactgctgcgcgttctgcaggagcgcgaaatcacccgcgtcggctcgcgcaaggccattaaggtggacgtgcgggtgatcgccgccacccacgtggacctgatgcaggccatccgcgagcgtcgtttccgcgaagacctctactatcgcctgaatatcgctctcgtcccgctgccgccgctgcgccagcgtcgccaggatattcccgtactggcggaccattttctctcgctctacgcccgccgcctgggccgcccggctcgtcgtctggccccggagacgctggcaaggctgatggagtacccctggccgggcaatattcgcgagctggaaaacactctgcataacgcggtattgctgagtaaagaagaggagatcggccccgcccagctgcggctgacgacgctgaacaatgagccctcggcggcgggcgataatgagctcgacgattttattcgtcgtcagctttccctgccgggcgagccgctgtgggagagggtcaccggggcgttgatacgcggcgcgatggcccacagtgacgataatcaaagccaggccgcggcgctgctcggtattagccgccacacgctgcgcacgcagctggccaattttggcatcattaaaagccgccgccgtcaggagcccctcttcggcccggcggtcaacagcgtctctcgcgaccgggaactgcgcatcggcttccagcgcttcggcaatcttggcatcctgaaagcgcggcaaagtctcgagcaagcctttgccagccgcggcgtcagcgtgctgtggagcgaattccccgccgggccgcagctgctgcacgctctcgcctgcgatgagatcgattttggcaccaccggcgaagcgccgccggttttcgctcaggcgagtaacggcgagctggtctacgtcgcctgggaaccgcccgctccgcaaagcgtggcgatggtcgtcccgcagcacagcgacattcgcaccattgccgacctgcgcggcaagcgtatcgcgctgaataagggctctaacgtgcactggctgctgctgcatatcctggaagaggccgggctggcattaaacgacgtcaaagtggtctatattccgccgaaatatccgctgaccgccagcgattacctggcggtggacgcctggatgatgtgggatccgctgctcagcgacgcggaatatagcggcgaattacgggttgttgccagcggcgaggggcgcgtcaataaccaccagttctacctgtcgcgccgcgactacgccagccgcaatagcgatatcatgcagcgcctgttagccgagctggcgcagaccggccagtttattgaccagcaccgggagcaagccgccggactgctctccgccgagctggggcttaacgccgcctctctgacgcgcgccttatcgcgccgcagccatcgtccgcggccgatggatctcaacgtgattcgcgcccaacaaagtatcgccgatcgcttttacgccctggggcttatccacaaaccggtttcggtgcgcgaggcggtctggtacggcgaagccaccaatagcgatctcggcctgctgatgcacgttgattagccggaaactgcgagtcatcttcctgatttccctggcggcaatagcctcatacgcgcggcgatgttaccctgaaaggcactgcaataagagcctatttatgaggatatccgtggccgttcatctgttaatcgtcgacgcacttaatctgattcgccgcatccacgcggtgcaggggtcaccctgcgtcgacacctgcctgcatgcgcttgaacagctggtggtccatagccagccaacccacgtggtggcggtatttgatgatgaagaccgcggccacggctggcgacatcagcgtctgcccgattataaagccgggcgcgcgccgatgccggagaccctcgaagcggaaatgccggcgctgcgggcggcgtttgagcagcgcgggtttcgctgctgggcgctcagcggcagcgaagccgacgatcttgccgcgaccctggcggtcaaagtggcgcaggccggccatcaggcaaccatcgtttcaaccgacaaaggctactgccagctgctgtcgccaacgatccgcatccgcgactattttcagaagcgctggcttgatgcgccgtttatcgccaaagagtttggcgtaacgccggaacagctgcctgactactgggggctggcgggcatcagcagctccaaggttcccggcgtggcgggcattgggccgaaaagcgccgcccagctgttaaccgattttcaggatctggaagggatctacgcgcggctggcggacgtgccggagaagtggcgcaagaagctggaagaacagaaagagatggccttcacctgccgggacatcgcgcgcctgcaaaccgatttacagctggacggcaacctgcagcagctgcggctggcccggtagcgccgggccgcggtgcgcgcggcttcccggaggcgatgctgcgcatctgtccgggctaccaaaccgcagacggtgagcgcattccccgggtcgcggcttacgccttacccgggctaccgcagacggcggtgagcccgtagcccgggcaggcgcttgcaccgtcccagggtgcaaagcacagaggggcagcccgtagcccggctaagcgcagcgcaagccggggaataacagcgccggggtatcagcccagcacatctcccggacgcagccggcagaagccttcgcttacggcatcactcttcgatacgcaatccgtaggttttgaatttctccagcacgatagcaatggcctcgtcgccaagaaccggcaccgggtcggtgatggccagagtgctgagataaagctgcgccagcacctcaacttcatgcgccagccacagggccttctccagattctcttcacaagcgatcaggccatggtgctgcagcagcgtcgctttgcggtttttcagcgccacggccacatgctcagacagctcgcgggtaccaaacgtggcgtagggcgcacaggggatagagttgccgcccgccgcagcaatcatatagtgaatggcgggaatgggacgattgaggatcgacaccgccgtagagtgaaccgcatgattatgtaccaccgcgtgagcatcaggccgcgtctgataagccgccatatgaaaacgccactcgctggacggcagtttgccctgttcatgctgaccttcggcatcgatatacacaatgtgcgcttccgtcagcttttcgtaaggaatacccgttggcgtgatcagcatccccccttgataacgcacgctcacgttaccggcggttccctgatttaaccccaggcgggtcatttccaggcaggtatcaataatctgccgggccagtctatttcgttccattctttacctctctttatgatgcgcaatgcgacaacagacggctcgccggagatgacgctccgacgctgttgaatagctcaaataattactcaccatcatcatcccgaataagcagaaaggaatttacatccgccggttctgtgattcctctcacttatttcagtataaaaacaaccgttcattgatttttgctttctgaaaaatgcccgttcttactaatagatttaaaaacgggcattttactgatagttttaacaactgcccgttttccacataataaaataaatcggtcatcgagcctgtgggttttacaattaactttctcaaacggtcatgtttttctgattattaaagtgatgataatcacataaaaccaccgagtggatacgaagtgtgaccgctatcatattaaaaggcttttttaatttgaaaatgaattcatgagttcactccgtgatgtttatttcactgttgatgtcgtcacaagagctcgcctgatttttgcggtctggtgggcataagccggctgctgaacacgcttctgaaccaatgaggatgctatgggaaacacaacaatacaaacgcagagttttcgtgcggtagagacagggcaaagcaagcgctacattattcccttcgccctgctgtgctcgctgttttttctttgggcggtcgcaaataatctcaacgatattttattaccacaatttcaacaagcctttaccttaaccaacttccaggctggactgattcaatccgccttttatttcggctatttcgtcattcccattccggccggaattttgatgaaaaagttaagttataaagtcggcattattaccggactgttcttatatgcttttggcgccgcgctattctggcccgccgctgaagttatgaattacaccttattcctgattggcctgtttattattgctgcaggcttagggtgtttagaaaccgcggcaaacccgtttgttaccgtcttaggaccagaaagcggcggtcacttccggcttaatcttgcccaaacgtttaactcgtttggcgccattattgcggtggtttttgggcaaagtctcattttgtctaatgtgccgcatcaatcgcaggatgtgctcgataaaatggctccggagcagcttagcgcctataaacacagcctggtgctctcggtgcaaaccccgtatatgatcatcgtcgcggttgtcttactggtcgctctgttgattatgttgaccaaatttccggccctgcagagcgacgaccatagtgacgccaaccagagttccttctccgcttcccttgctcgcctggtccgcgttcgccactggcgctgggcggtgctggcgcagttctgctacgtcggcgcgcaaaccgcctgctggagctatctgattcgctacgctatcgaagagatccccggcatgacgcccggtttcgccgccaactatctgaccggcacgatggtgtgcttctttatcggccgcttctccggtacctggctcatcagccgcttcgcgccgcataaagtgctggcagcctatgccctgctctcgatgatcctgtgcctgatttccgctttcaccggcggccacgtgggtctgctggccctgacgctgtgcagcgcctttatgtcgattcagtatccgaccatcttctcgctgggcatcaaaaacctggggcaggacaccaaatacggctcctcttttatcgtcatgaccattattggcggcgggattgtcactccggtgatgggctttgtcagcgacgcagccggcaacatccccaccgcggagctggtcccggcgctgtgctttgccgtcatcttcatctttgcccgtttccgttcgcaaacggcagctaactaaacatttatccgaataacgtgaggaatctggaatgaaaaaaatcagcttaccgaaaattggcatccgcccggtgattgatgggcgccgcatgggagtgcgcgagtcgctggaagagcaaaccatgaatatggcgaaagccaccgccgcgctgatcgcggaaaaactgcgtcacgcctgcggcgcgcagattgagtgcgtcatcgccgacagctgcattgcgggcatggcggaatccgccgcctgcgaggagagattcagcagccagaacgtcggcgtcaccattaccgtgactccgtgctggtgctacggcagcgaaactatcgatatggacccgctgcggccaaaagccatctggggctttaacggcaccgagcgccccggcgcggtttaccttgcggcagcgctggcggcccacagtcagaagggtattccggcgttctccatttatggtcacgacgtgcaggacgccgacgacacctccattccgccggatgtcgaagaaaaactgctgcgctttgcccgcgccggcttagcggtggccagcatgaagggcaaaagctatctttccgttggcggcgtgtcgatggggatcgccggttctatcgtcgatcacaacttcttcgagtcctggctcggtatgaaagtgcaggcggtggacatgaccgagctgcgccgccgcatcgaccagaaaatctatgatgaaagcgagctggaaatggcgctggcgtgggcggataaaaacttccgctacggcgaagaccagaacgcgcagcagtataagcgcaacgccgaacagagccgcgcggtgctgaaagagagcctgctgatggcgatgtgcatccgcgacatgatgcagggcaacaagaagctggcggaaaaagggctggtcgaagagtcgctgggctacaacgccatcgccgcgggcttccagggccagcgccactggaccgatcaataccctaacggcgataccgccgaagcgctgctcaatagctcgttcgactggaacggcgtacgcgaacccttcgtcgtcgccacggaaaacgacagcctcaacggcgtggcgatgctgatgggccaccagctgaccggcaccgcccaggtgtttgccgacgtgcgcacctactggtcgccggacgcggttaaacgcgtcaccggccaaccgctcaccggactggcggaacacggcattatccacttgatcaactccggttcagcggcgctggacggcgcctgcaaacagcgcgatgcggaaggcaagccaaccatgaagccgcactgggaaatcagccagcaggaggccgacgcctgcctcgcggccaccgaatggtgcccggcgattcatgaatatttccgcggcggcggcttctcctcccgcttcctgaccgaaggcggcgtgccgttcaccatgacccgcgtgaatatcattaaaggcctcggcccggtactgcagattgccgaaggctggagcgtagagctgccgaaagcgatgcatgaccagctggatgcccgcaccaactccacctggcccaccacctggtttgcgccgcgcctgaccggtaaaggcccgttctccgacgtctactcggtgatggcgaactggggcgctaaccacggcgtgctgaccatcggtcacgttggcgccgactttatcaccctggcgtcaatgctgcggatcccggtgtgcatgcataacgtagaagaggcgaaaatctaccgcccctccagctggtctgcgcacgggatggatagcgaaggccaggattaccgcgcctgccagaactacggcccgctgtataaacgttaaaaatgcctgatggtgctgcgcttatccggcctacggatgataccgttcccgtaggccggataaggcgtttacgccgccatccggcaacgtctcgggagagattatgaagaatgaagtcatcctggtcctcgactgcggcgccactaacgtacgggcgattgccgttgaccgtcaggggaatattatcgcccgcgccgcaacggccaacgccagcgatatcgccgtggagaacagcgcctggcaccagtggtcgctggaggcaatcctgcaacgcttcgccgaatgctgtcggcaaattgccgacccgctctcatcctgcacggttcgcggcatcacggtcaccaccttcggcgtcgacggcgcgctggtggataaacagggcaagctgctctatccggtcatcagctggaaatgtccgcgtaccgcggcggtgatggacaatatcggctgctttatgcccgcgcagcagctccagcagatctccggcgtcggcgcatttggtttcaacaccctgtataagctgatatggctgaaagagaaccacccgcagctgctggagcaggcccacgcctggctgttcatctcctcgcttctcaaccagcgtctgaccggcgaattcacgaccgatatcaccatggcgggcaccagccagatgctggatatccaccagcgggatttcagcgcgcagattctgcaggccacgggattgccgcgccgcctgtttccccggctcgttgaagcgggccagcagattggcacgctgcgaagcgatgccgcgaagatgctgggtttagccgtcggcattccggttatctccgccgggcacgacacccagttcgcgctgtttggcgcgggcgcggagcaggatgaaccggtgctgtcgtccggcacctgggaaattctgatggtgcgcagcgcccaggtggacacgtcgctgctcagccactatgcgggctccacctgcgagctggattgtcagccgggacgctataaccccggcatgcagtggctggcctccggcgtgctggaatggatacgccagctgctgtggacgcctgagacgccctggcaaacgttgattgaagaggcccgggccctcccccgcggcgctcagaaggtgaagatgcagtgcgacctgctatccagcccaaccgcaggctggcagggcataacgctgaataccacccgcggtcatttctacctcgccgcgctggaaggattagccgaacagctagcgcacaatctgcaaacgctgcagcaaatcggccacttcaaagcccgcgagctgctgctggtcggcggcggcagccgcaacgcgctgtggaatcagatcaaagccaacaggctggagatccccattaaagtactcgatgacgccgaaaccaccgtcgccggcgccgccatgtttggctggtatggcgtcggtgaattcagcagcccggagcaggccagagcgcaggtgagctaccggtatcgttacttttacccgcaaaccgaacccgaactgattgagggagtatgagatgctaaaaacgatttccccgttgatttccccggacctcctcaaagtgctggcggaaatggggcatggcgatgagattattttttccgatgcccacttcccggcccacagcatggggccacaggtcattcgcgccgacggcctgcgggtgagcgacctgctgcaggcgattattccgctgtttgagttagacagctacgctccgccgctggtgatgatggccgccgtggaaggcgacgccctcgaccctcaggtagaaacgcgctatcgcgaggcgctttccggccccgcgccctgcccggagatcgcccgcatcgaccgctttgctttctacgagcgggcgcaaaaagcctttgcgatcgttatcacaggtgagcgcgctaagtacgggaatattcttttaaaaaaaggagtaacgccgtaatctcatgccggagcgcccgtctgatgcgggcgctcagcgaacgccagggtgagaaaaatgaaagcggcacgacagcaagcgatactagacctgctcattaaccataacagcctgaccaccgaagccttatcgctacagcttaacgtcagcagagaaaccattcgccgcgatctcagcgagctccagtcccaggggaaagtgctgcgtaaccacggtcgggcaaaagtcattcaccggcaaagccgtgacagcggcgacccttttcatatccgtctgaaaagccactacgcgcacaaagcggacatcgcccgcgaggcgcttgcgtggatagaagaggggatggttatcgcccttgatgccagttccacctgctggtatctggcccgccagctgccggatatcgaccttcacgtctttaccaacagccagccgatttgccaggagctcagcaagcgagagaacattcagcttacctgctccggcggtacgctccagcggaaatacggctgctacgtcagcgcgtcgcttatctcacagctcaaagcgctggagatcgacctgttcattttttcctgcgagggcatcgacagcgacggcgcgctctgggactcaaatacggtgaacgccgagttcaaatcgctgctgcttaagcgagcgtcgcaatcgttattgttgattgataagagcaaatttaatcgttcaggggaggcgcggatcggccatctggatgatgtgacgcatattgtttcggacgtgtcgcagtcgtaacggctatggcagcgccggatagcggcttaacaccctatccggcctacagatcaaactagcgttcgtcgcggcgaccgccgacggcagcccacaggcggcgaacgtgaaccgtcacctcttcgcgatcgtgatacagctggcgcgcctggatttgcgcgttgatgccgtgctcgtccagctgttcctgaatataggccaggttgcgcgacagctcttcgtagcgttttttcatcggcagcttcaggttaaagatggtttcccggcaccagccgttcaccagccactgggccatcagcgccgccacttttgccggtttctccaccatatcgcacaccatccacgaaatgttgttgcgcgtcgggcgatacttgaagccatcttcacgcagccaggtcacctggccggtatccatcaggctttgcgccatcgggccgttatccaccgaggagacccacatattgcgtttcaccagctgataggtccagccgccggggcaggcaccaagatccacggcgtacataccgttcgccaggcgctcgtcccactcatccgccggaataaagacgtgaaacgcctcttccagcttaagggtcgaacggctcggcgcatcggacgggaacttgagccgcggaatgcccatatagaacggcgagttgttgttagacaacgagtaaccggtgtagcagcagccgggggcgataaagaacacgtggaccaccggacgctttggcgtttcatagttggtcagcacgcccgcttcgcgcagcgccgcgcgcagcggtaccgtaaacttgcggcagaacttcatcagctctttgctttcgttggtatcggccacttcaacgcgcagctcgccgcccttctccaccacgccctgcagcataccgacgatcggggaaatccggtcttccggcggcaggtcgcgcagcagttcgccaaccacaaacatctggcgggcaaacaccagcgagctgaacggcagttcgcgcaccagcttttcgccatcttcggcctggtagcactcaaaaatcacatagccggagtcgtctttaacccgggcaaaaccaaacacctcaaggcgcgaggccttatcggtaatttctgctgcgcactctttctcaaacccagggcgacaatagaggacaactttattcatgaacaacgcccttacgtttcagacgaattgcaccaattaacattaatatccaaccggcgaggaagcagacgcccccaaccggcgtaacgaacgcccacaggcgtaaatgcgagagcgccagacagtagaggctgccgctaaaaagaacggtaccgagcgccataaagacgctgctccagtaaaaccagatgctgatgcggcgctgcatcgccaccgccaggccaaaaatagccagcgtatggaatgcctgatactgcaggccggtgtggatccagcccatttccgcaacgcccatcgttttactcaaaacgtgcgcgccaaaagcgcccaaagccacaaagataaaaccgcttatcgcggcgaaaatcagcataaaacggctggtcatgtgtttaccctacgatgatttattgttcataacgaaagcgaaatttttcttgttcattagccgcttttgccagaatccactggcggaaggcggctattttacccagttctgcctgactgtcatgacaaacgagataaaacgcattcttactgaccagaacatcattaaacgggcagaccaaacggcccgcctcaatctcggactgcgccatcacattgttggccagcgcgaccccctgtccatggattgccgcctgcagcaccattgcgctgtggctaaatatcggtccctgttgaacattaatatggtttagacctaactggcgggtataagtttgccagtcgcggcgggaagcatcgtgcaacagggtatgttgcgccagatcggcaggcgttttcaacgctttatcgccggtgagcaacagcggtgagcacaccgggagcagatattcggcgtacagcttttccacccgcagccccggccagttgccgcggccgtaaaaaatcgccacgtcgacatcgtcggccagcttatcctcctgacggtccacggcctggatcctgacgtcgattcccggataagctgagttaaagcttgtgagccttggcaccagccactgaatggcaaaactggggagcatactgacggttaaggccccttttgcgcttcgggcctgaagcttgcgggtcgcttcggtgagctgcgaaaaaatctctttgatatcctgaaaatagctctgcccctcctccgtcaaaagaagagaacgattgcgtcgacggaacagcttgaggccgaggaaatcctccagggacttgatttggtggctgactgcggcctgcgtcacaaaaagctcatcggcggcgcgagtgaagctaagatggcgggcggctgcatcaaaaacacgtaatgcattcagaggtggcaaacgcttggacatagttattctggcttagatgttaaggcaatttaacaaacaggaaacaatagttaacctattagtttttttatctgagctattataatttgtccgttgagcttctaccagcaaatacctatagtggcggcacttcctgagccggaacgaagagctttttttggaatgcgtgttccaacaagcttttggcttacggttgtgatgttgtgttgttgtgtttgcaattggtccgggtttgcggaccatggtagctcagctaccccttttcacttcctgtacatttaccctgtctgtccatagtgatttaatgtagcaccgcactgcgcggtgcttttttttgcctgctataccgaaatcacttatccagttcgcccagctgttttacgtcagaacggttaatctgctgcttgttaccccaggcatctttgtacgaaatcatgccagtatcattatccgtttgcggtttgccgtcggtcacgatggtgcgcccatcgttggtatgcatcacgtagttggaggagcaggcgctcaggccaaaggtcagcacacaggcagaaataattgcggcagtcttattcattttcatctttctctcctttcgactatttatactgtttatgattcgttctgtaccaggttaaaacgcaaacccaacactattcagcataactatcttttacccacccgaagccatattcagaaaattccagtcgttagcagaaaccttgtatcacccgccgatttgcgcgacgatcctgatatcgatacgaggaatctcatgaacgcattcaaccccgtccaatttcgcgcccagttcccggcgctggccgacgccggcgtctatcttgatagcgccgcgacaaccctcaaaccgctggcggtcattgaggccagcgaccagttctatcgccttagcgccggtaacgtccaccgcagccagttcgccaccgcccgtcagctaaccgaacgctatgaaaacgcccgcgaacgggtggcaacgctgctcaacgccccttccggccaggatatcgtctggacgcgcggcaccaccgaagccattaatatggtggcgcagagctacgtgcgcccgcgcctgaaacccggcgatgagattatcgtcagcgaagcagagcatcacgccaacctggtgccgtggttaatggttgccgggcaaaccggcgcgcgggtggtgaagctgccgctggcgggcaaccgcctgccggacgtggcggcgcttggcgcgcttatcacgccgcgcagccgggtgctggcgattggccagatgtccaacgtcaccggcggctgtccggatctgacgctggcaatacgccaggcccgcgctgccgggatggtggtgatggtcgacggcgcgcagggagcggtacatttcccggcggacgtccaggcgctggatatcgacttttatgctttttcaggccataagctctacgggccgaccggcatcggcgcgctgtatggcaaaagcgaacggctggcggagatgtcgccgtggctcggcggcggaaaaatgattaccgaagtcaccttcgatggcttcaaaacccagcccgccccctggcgcttcgaggcgggaacgcccaatatcgccggggtgatcggcctgagcgcggcgctggagtggctggaggaaacggacatcgcgcaggcggaaaactggagccgcggcctggcgacgctggcggaagacgaactggcgaaacgtccgggcttccgctccttccgctgccaggacgccagcctgctggcgtttgattttgacggcgttcaccatagcgatatggtgacgctgctggcggagtcggggatcgcgctgcgcgccggtcagcactgcgcccagccgctgctggcggcgcttggcgtcagcggcacgctacgggcctccttcgcgccctataacacgcaagacgatgtctacgcgctggtgcacgccgtggaccgcgctctggaaatactggtggattaatgacgacttctcacccttttggtacccgcatcaccgaggcatctctacggcagacctttaccccgctcagccagtgggaagataaataccgccagctgattttactgggtaagcagcttcccgcgctgccggacgacctgaaagcgcgagccaaagagattgccggttgtgaaaaccgcgtctggctggggcacgtcgttgacgccgagggcaagctgcatttcttcggcgatagcgaaggccgcatcgtgcgcggcatgctggcggtgctgttgaccgccatagaaggcaaaagcgccgctgagctgctggcgcaggatccgctggcgctatttgatgcgctggggctgcgcggccagctgagcgcctcgcgcagtcaggggctcagcgccctgagcgaagcggtgctcgccgccgcccgcgaggttgaggtttaagcttatcccgggggcggcgcttgacgcgccttgcccgggctacgggttcgtgcggttttgtcgcccggacaggtgcgcagttttgtagcccgggtaaggcgcctgcgccgcgacccgggaatttacgccgtctgccgctccgccttcgccagcattttcttcagcgcgtgggagacggcgacaaaaccaaaggtcgcggtcaccatcgtcgcggcgccaaagccggatgcgcagtccattcgcttcggcccctcagcggtgcttttcatcgcacaaacgctgccgtccgcctgcggataaaccagcgcttcggtggaaaacacgcaatccacgccgagcttacctttgctgttcttcaccaccccaaactggctcttcaaacgctcacgcagctttgccgccagcggatcctggatggttttcgccagatcggcgacctgaatttgcgtcggatcgatttgcccgcccgcgccgccggtggtcaccagcggaaccttatggcgacgacagtaagcgattagcgccgctttcgggcgcacgctgtcgatggcgtcaatcacgtagctaaagccaacgccaagatactcggcgacgttttccggggtgacaaaatcgtccaccaccgtgacccggcactcggggttgatcaggcgaatacgttccgccatcacctcggctttcgccaggccaacgttgccgccaagggcgtggatctggcgattggtgttggtcacgcagacatcatccatatcgatcagggtaatcgcgccaattccggttctcgccagcgcttccgccgcccatgagcctacgccgccaatgccgaccacgcagacgtgcgcgtcggcaaaacattgcagcgccttttcaccatataaacgcgccgtgccgccaaaacgctggcgccaggcatcgctgattacaacagacataaaacctcagaattagtggacattcccgggtcgcggcgcaagcgccttacccgggtgacaaaatcagccgtagccccggtaagcgtagcgcgaccggggaaaagaaccggcgtactagccgctaaagacgttgcccgcgcccggggcgtttttcagcacccatacgcggccgtagtggttataccagccggcacgatgcccggcatccgggccaatgccctggtaaatatcgaagtgctggcctttaatcgccccgccaacatcgagagccaccattaaacgcagctcgtactggccgttaaacttgccgttgttatccagcagcggcacctccgccagcagcgtggtgccggcaggaacaatggaacggtcggaagccaccgatgcccggccaatcagcggcaccgcgctggcgcctttcaccggcgcaaaagactgcggtttaaagaagacgaacgacgggttctgctccagcagctcgcgcacttccgcctcgctgtgtttttcgccccattcgcggatcgcctgcatcgacatatcttcgcgcttcacttcgccgcggtcgatcagcactttaccgatgctgtagtacggccagccgtttttcccggcatagctgaagaagttcagcggcgagccgtcgccaaaatcaatgtaaccgctgccctgcacgtccatgatgaagttatccatcagcgagttgctgtaggccaggatgtagttgtcgctcagagcgccggcgtagatgctggcgcgggacggcagcttgccgcgcttcggcggcatccggtaaatcgggtactggaactcgccctggcgagtatggcgcgcctgcaccaccggcgtgtagtagccggtaaactggacgttaccgtagttatccgtcccctgcatctgccaggcgtcgataccaaactggctcagcgtgcgggtgtcgccgccggaacgcagccactcctgaatcgcattgtagacgttgctctggctggtgtagaggcgcggagaggcgctacgaatctgtctcacctgctcggagaaatcgccggcgttgatcggcgagccgaccgcatcaggttggttaaccaatgaaaacggctgggtgagtttaccttcattatactgctgaccgcgatcggtcggttttgaggaacaggcggccagcattgccagcattgcgcctgttactgcgtattttgcccaacgtcctttcatggtatctcttctttatgctgctaagcccgggtgcgtgatgaagataacaaacccccagggctaatgaaatgcgcttaggcaccgcaaaggcagttttgcgcaaaaaataggctggaagtgattctatatgcaccattttttacaaaattgatgatttctgccaaaaagggttgcatcaaaacgttagcggagtatagtgcgcttccacggacgcggggtggagcagcctggtagctcgtcgggctcataacccgaaggtcgtcagttcaaatctggcccccgcaaccaattaaaatcagagaagtaacgttactcgatggaagagtaatgacggacgcggggtggagcagcctggtagctcgtcgggctcataacccgaaggtcgtcggttcaaatccggcccccgcaaccaattaaaatctgatgcaagtttactcgatgaagagtaaagacggacgcggggtggagcagcctggtagctcgtcgggctcataacccgaaggtcgtcggttcaaatccggcccccgcaaccaacatcataaacaccctcaagggtgtttttttgtttctgcgctccgcaaaatcttatgcctgattcagggaacggcgcagcgccgctccccagccctttctcagccctttggcaacacaatattgctcgccgccagcatgcccatctcgtgatacatcgcgcaggccgcttccacgatcggcatcgccagcgccgcgccgctgccttcgcccagacgcatccccatattcaggtagggctccagttcgagatgcatcagcgccgtacgcgcgcccttctccgccgaatagtgggacgggatcagatagggcttcacttccggcgcaattcggcacgccgccagcgccgccgcgtaggagagaaagccatcgagcaccaccggcaggccgcaggaggccgcgcccagcatcacgcccgtcatccccaataaatcaaaaccgcccacttttgccagcacgtcgagaccatcgttcgggtcaggccggttgacggcgatagcccggcgcaccacttccactttattagcgaccttcgccaacggcagattagcgccaatcccgaccacctcctgggcatcgctgccggtcagaacgctgacaatcgccgccgccggggtggtattggccattccgagctccccgacgccaaacagggtgacgccatcctgcgccagccctcgagtatggcgcatcacctccagcagcagctcttccgcctggccgcggtgcattgccggaccgacggcgatattgccgcagccgcgcgccacgcgcatgttgataacgcccggaatcagctcagcatcgatcccgacatcaatcacgtgcattttcgcgcccgcctgcgccgccagcacgcaaacgccggttttccccagcatcatattcgccgcctggatggcggtcaccgctttcggcgagatggcgaccccttcgtcccacacgccgtggtcggcgcacatcaccagcagcgccttctttttcacctgcggcacgccgtcaagaccgggcatgcccgccagctgtacggcaagatcttcaaggcgtccaaggcttccgggcggcttcagcaggccgtcgatatgaagccgggcgcgcgccatcgcgctttcatcaggcgccgggatcgcgcccagtagagaggttaagctttgcatagaggttctcgtcttgttggctggctcatggcagagccagcaggaagaataacgcccggtacggcgcgcctggcctatttgatttttacgccaatgcccgacaccaccagccacacctcgtccgccgccgccgccaggcgctggttaacgcgcccggcgatgtcgcggaaatggcgggccagacggttttccggcacaatccccatccccacctcgttggtcaccagcaccacgcgggccgggcagcgctggcaggcggcaatcagtaccgcgatttcggcgtcgatcgcccgctccatcgccgcataatcccagtcgtccggcgcgctgtcgccccccagcgcaaacagcaggttggttaccatggtggtgatgcattccagcaaaatcgcctcctccggggcgatatccggggtgatcagttcatcaagctgctgccagcgctcggcggtgcgccagtgcgcgggcctgccgtcgcggtggtgctggatcctcgccgccatctcgtcatcaaagatctgcgaggtggcgatatagagtacctgcggcgcatgggcgatcagcgcttcggcatggcggcttttaccgctgcgcgccccgccggtcactaatgtcagcatacgggctcctgatgttggcgcatgatggcgtagattttttcgatatcaatatgctgacgcatcgcgtccgccagcagatcgaactggcgagatttatactgcgcatactcgaaatcgctatccagcgccgccagccctttacgctggcgcaggccgttaaccagcgcgcgggtaaatgcatcgctatcgaacaggccgtgcagataggtgccaaacgccaggccgtcatcgctgaccgcgccgtccgccacattctggccgcctttatgtaattgcatcagcgaacggcagccgtcgcgcagctcggtttcgcccatatgaatttcgtagccgcttaccgccagccccgccgttgccgccagccacgccggcagcgccggagccagagtcgccgttacctgggtggtcgttttgctgtgcgcaaagtgggtgacggtattgagcaaccccagccccggctgggtgccaagccccgactccacctcatcaataatggtttcgccgagcatctggtagccgccgcagatccccagcaccggtacgcccttacgccgggcctgcagtaccgcgtgcgccatgccgctctcgcgcagccagcccaggtcgccgagcgtatttttactgcccggcaggataatcatatccacgcccgccagctcctggggctggcgaacatagcggacgcggacgtccggctgcgccgccagcgcgttgaaatcggtgaaattagagatgtgcggtacctggaccacggcaatctcaatatcgcgcctgtcggtacgcagatatttccctttttgcagcgcgacgccgtcctcatcttcgagatcgacgtccagccacggcatcacgccgagtaccgggacgccggtgagcgcttctatctgctcgatcccggaatacagcagcgccacgtcgccgcgaaatttattgataatcacccctttgacccgcgcgcgctcgcggtcatgcagcagcgcgagcgtgccgtagatggaggcgaatacgccgccgcgatcgatatccgccacgaggatcaccgggcactgggccatctcggccatgcccatattgacgatgtcgcgatcgcgcaggttgatctccgccggactgcccgccccttccagcaccaacacatcatgttcggcggccaggctgttataaaccgcgaggatctgttcgcgcaggcgcggcttgtattcgtgatagctcaccgcgtccatatcggtcgccactttgcccatcagcaccacctgcgctttacggtcgctggttggcttaagcagcaccgggttcatgcgcacatccggggtagtgcccgccgcttcggcctggaaaatttgcgcgcggcccatctctttgccatccggcgtgataccggaattaagcgccatattctgcgatttaaacggcgcggtgcgctgcccgtcctgataaaagatgcggcacagccccgcgaccagcacgcttttgccgacgtcggaagcggtgccctgtaacataattgccagcgtcatgacgcctccttcatcgcgttgtttcgcatccgcgtaaaaaattcttcttcggttttacacagcggcagcccgagctgcgcgtgcagtttcaccagccacggctgggtgagcccggcctgggccatcagttcgctgcgggcaaacacctccccgggttcgccatgcgccagcacttcgccgcggcgtaacacgtaaaccgcatcgctgatttcatagatcagatcgatatcgtggctggagatcgccacgtggttgccccgatcggcaatgcgcttaatgatgtcgatcatctgcgcgcgtcccgagggatcgagccccgccgtcggctcgtcgagcagtaaatagcgcgcctgcagcaccagcgcgccggctatcgccacgcgctttttctgcccgtggctcaggcactgaatcggctggtgacgaaacccctgggcatcgacgagagtcagggcatcgtccacccggcgggcaatttcctcttccgcaacccccaggttacgcaggctaaaggcgatatcgctgtcgatatcggtatagaaaatctgctggtccgggtcctggaaaacggtcgccacctgctgacgcagcgccagcaggccgcgtttgctgtaatccagcggttttccctgccacagcaccgccccgctctgcgggcgcagcagaccgctcaggttcataaacagcgtggattttccgcagccgttcgcccccaccagtccggtcaccgcgtgacgggaaaaatccagcgtcagccccttcagcaccggctcgtcctgatagcgaaaccagagatcggtcgtggcaagcatacttatccttagaggtgaaagtcaccctgatacagtttgatatccagcgtggtgctcatctgctggtagcggatcatcacccgggtaaacagcagccctaccagcatcgccagcgaacgatagcccttcggcacgctacggtagccaaaacgtaatgtttgcgcacgatgaatcgccagcgcttcgtctaacagaataaaaataaagcgccaggtcagcaggatttgctcggtcagcagccgcggcacccgcccgcgcttgagcagcacaataagctgcgggaacggcagattcagcaccagccagaaggtggacgccagcgccgccaggctgcgccagaaggtctgattggcggtcgtcagcccctccgacgtgatgcccagccagacgctgcccagcggcaggctcagcagcagatcctgcggattgcggctgacgctaaacagaatggtcagcacgccgatcagcaggaagccaaacggcagcgccatccagcggcaccagcgccacggcgagacccgcagcagccagcaggttaaggcggcaatcagcgccatttcgataccctgccccagcggaggcagggtaaaggccagcaccatcagcagcagccagaacaggaacttgcgctccggcgcgacgtgaaaccagcggctctgatagctaagtcggtcaaacccggtcatcacggcgctgtctgcctttgctgtagcccagaatatagaaaatcaccgccgcgccgagggagccctggagcgtaaacagcaggctctcaatttctccactcgccggttcgtacagcggctggaaccacggctcataatgcggtgcgaccacctgaatctggctctccgcctcgccgtccgaaccgccaaactcgccgccgtgatcgacaaagaacggcaggatcaccagcgccaccaccatggctaacaatatcagcgtctttttcatgttaatgcccctgtgcggtaatcagctgacgtttggtcaactggtcgtagatcatgacggttaacagtccttcagcaatggcgatcgggatctgggtcaggcagaagatccccataaacttgacgatcgatccggtcgcgccggcggtcggatccgggaaggccacgccgagctgtacggaggtgacaaagtaggtcaccagatccgccagcatcgcgcagagaaacaccccgacatcgcggcgaatgcccgcgcggcaggccattttccacaccatatagccgaccaccggcccgatgaccgccatcgacatcccgttcgcgccgagcgtcgtcagcccgccgtgcgccagcagcagcgcctggaacagcagcacgatggcgccaaggatcgccaccacgccaggcccgaagagaatcaccgccaggccgacgccggtcgggtgcgaacagctgccggtcacggaaggaattttcagcgccgagaggacaaaaataaacgccccgcacagcgccagcagcaccttctggttgttatcttcctgcacgatgcggcgcaggcgcaccagcccgtaccacaggcagggtaaaaacagcagccaccatgccagggcccacatcggcggtaaaaacccctccataatgtgcatcgcgaaagccttttcgggtaccactatcagcaatagcgccgcagctaacccgctgaaagacagctgttttagctgttgttcaagtttcattctgcatactcccactgtttattgaccagaatggtcgagaaatagggcagcggctggtcgtcgctgacgtcacggagatggcgccagcactgctcgcccggcagcgtggcttcggacatcatcagcgcggcatccagcagaccgtttttcgccagcagcgctttgatgcggggaaaccgcccgtacactttcatcagcaccaggctttcatgctggcgcagcgcctgctcgatttccgtttccggcgcggtgcaggagatcaccgccagcgactgctgctccatagccagcggcgtttttgaacgcgcggcaatggcggcgaaagaggtgacgccgggaacaatctccagccacgccgggctgccgatacgctggagtaagaacacccaggtgctgaacagcatggcgtcgccgagggtaataaacccgacctgcttgcccgcctccacttcctgcaccagcgcggcggcgacctcatcccataccgcctctttttccgcgctgtcggcgctcatcgggaaatggcagcagcgcacttcggtccgttcgccgatatactcccgcacgatggagagcgcgaggctgtcgccgcctttacgtccggcgggggcgtagagaatgtccagcttgcccagcacccgcgccgcgcgcacggtgatcaggtcggcggcgccagggccggtactcagggcatacagtttgccgctcatgccgcctcctccatcgccaggctcagcgcctgctgcaggtgagcgacgaacattgcgcgcaccgccggattctctcccagcccgttcagccacggcgtcgccgtgataccggcggcgttgaacagcgttttccaggagtcctcttcgtccgaggccatatcgttaatggcgtgatcgccggccaccagcatcagcggcatcaggtgcacgcccttcaccccctgccggcgcaggctgtcgataagaatatcgacttccggatagctctcgaccgcgccgacccgcgccggaaaccccttcgccgtcatcatatgatccagacaggcgtaggcggcgaaagcgtgatggctggcgccgtggcccataaagaccaccgtttcatcggcggcaagcggcggcatctgctggcgcagcgcctgcatcagctggacataatcgtgatggctgctcagcagcggcgcccccagcgtcaggcggaggaacagcgggcgcaggctttgcacttcgcggacgatcttttcatattcatcgccgttgataatgtgcagcgactgaatcgccacatcctggtagccctgctcggccagcttctgcagcgcctgcagcggcgtatcaatctcgataccgtcgcgctgcttgagcttgcggataatcatcccggaggtgaaggcgcgaaaggtgtcgcggtccgggcagctggccgccagctcgcgctcgcaggcgacgatattcttttcacaggtgtcgggatagctggtgccaaaactgaccaccagaagcgcttttttcatttcggactccttaagcagcggccagccagcgcgctaagcgccgggcaaaggcagcctgactttccagtaattcttcaccggtcaccagcggtgccgggcgcgtaatcacgatgcaggggataccggcatccagacagggttgtactttttcctgatagccgccttcggccccggaggctttggtgatcaccacatcggcccggcactggcggtagaaagcggcgttgaactcggcgctgaacggcccgcacagggcgaaaatctcgccaacgccgaaccccagtccggcgcactgggcgatgacatcggcgaccggcaacacccgggccagaagcgttttttcgcctaatcccgcccgccagcgcgccagatctttgcttccggtggtgagcagcacgcgaggaccgaagcgccgggcgacctcgcaggcctgttcaatgctctccacggtatagagcagcggatgcctcaggccgctcagctgttcagggcgctgatagcggctcagcagcacgccggcgatttcgcaggcccggacgatattgcggctcaccgcttcggcgtaggggtgcgaagcatcgatcacccagcgggtccggttagccttcagccaggcgatcatctcctccagctcgagacgcccgcagcgcacctggccgcgaatatcccccgccagctgctggccggtgggcgtcgccaccgacagggtgtatttaacctgcgccgcgtcaagctgctggcacagcgcccgcgcgtcgctggttccgcccatcaccagcacctcgccgtggctcacagcacgtagcctcgcggggtgatcatcaggccatcctggatatacgtcgctttgttgccaacgatcaccaggctggtcatatcgaccggtgcaaaatccatctcccccagggtggtcagccatttctcttgttttttacgtccggcggacttcacgacccccaccggagtctgcgcgcttttgctggccgacagcagctcaaaggcgcgcgccagatggccctcgcggccgcggctgcgcggattgtaaaaacagatcacgaagtcggcttcaccggcggcgacaatacgcttttcaatcaccggccacggtgtcagcaggtcgctgaggctgatatggcagaagtcgtgcatcagcggcgcgcccagcagcgaggcggcggcgatgctggcggtcatccccgggatcaggcggacttccacatccagcttctgcttgctgaccagctcaagcaccagtccagccatgccgtaaataccggcgtcgccgctgctgatcagcgccacgttatgcccggcctgcgccagctcaatcgccgcctggcagcgctcaatctctttgcacatcccggttttgatcacctgcttatcgccggtaaaggctttcaccaggtgcgtgtaggttttatagccaacgacgatttccgccgcctgcagcgcttcaatggcttccatggtcatcatggactgcgagccagggccgattccgattacgcttaacatcagtgtgaaactcccaaagtgatagtgacgccctgttcgcgcagggtttcgcccaacagttgcccatggctcagcagccaggccgccgggccggatacgctccccacgccgacggtttttctgacgaacgatgaagcggggaaatggtgctcatgctcgcgcagcgcatcagcgggaaaggtttcgaacggtacgcgacagcaggaggccagctgaatcagcccctgctcgtgcttcttcagcgtcacgctgccgatggctttcagcgccagcggatccaggcgctgcgcctcaagctggcgcgccagcagcgctgctaacagcgggaatggcgtatcgcgacggcagccaattccggcgaccacccgctgcggcaccagcttccagtgcggcacggcgatggccggcagctcgttgcgcagcgtgacgcagaccagcgcgtccagctcgggaagctggtgcagatcggtcacggtgataaatccccgccggtcgcagcggctgacgtcttcatccagttcgtcgtcccaccacaggccgacgcgctgctggctgaccagcatctggttgacggttttcaccgccgcgcggaaatcgctcatccgggcattaagctggaatgccagggtatccagcgccgccatctcgttgacgtcggtggcggtggtgatcaccgggtcggcgccaagcatcccggccagatagcggctgagggcattcgcgccccccgcgtggccggaaagcaggctaataacatgctggccgcgctcgtcaatcaccactaccgccgggtcgctgaacttgtcattcaccagcggggccagtacgcgtaccgcgatcccggtggcgccgatgaaaatcagcgccgaatagctgctgaaggcctcgcgcgcggcgctggcaaaaccgttttcaaaggggagaaacccctcttccagcagcttctcgctggtaaagcaggttaacggcagcatcgccgccagccgtttcgccagccgcacgccgccaggggtcaggcagaaaagcgcgattgattcaggctttacggtattcatggctaaagtccgccgcgtagagttttgagtagtgatactcagagcccaggaaattcccgaccagaatgagcgccgttttgcggatccccgcctcgcgcaccttgtcgccgatatccgccagggtaccgcgtacggtctggctttccggccaggtcgctttgtagatcaccgccaccggcgtggttgccgggtagccgccttccatcaggcgctccgccacccggtgaatgcgctgtacggaaaggtaaatcgccatcgaggtctggtggctggcaaacgactcaagctgctcgcgctccggcaccggcgtgcgcccttcgaggcgggtaataatcaggctctgggagacttccgggacggtgtattcgacgccaagctccgccgcggcgcccagaaacgcgctgacgcccggcaccacctgccagtcgatgccgcgtttggtcagctcttcgccctgctcgcggaccgagccgtacagcgacacgtccccggtctgtaaacgcaccaccgttttcccggctttaacgccggcttccatcaggtcgagaatttgcgccagatgcagttcggcgctgtcgtgacactcggcgccgggcggacagtactccagcagcgcggtgtttatcagcgacccggcgtagatcaccacctgggcctgctggagcaagcggtagcccttgagggtaatcagctcacggtcgcccggccctgcgccaacgaaccacacacaacgggggtcaaatgtctcagccatggttttcttccttctgacaggcgataacaaaaacgggattattcggtttgaaatagtggccgctgcccagcgcggtcagcgatgaaacgttcagctgcagggaatcaacctgttcgattcccttcagccgcagatagtcgagagcggcgttcaggttctcctggaggataaaggtcatcaccaggcgaccgccggggtagagctgctgccacgaccagtcaatgagctcgtcgaggcggccgccgctgccgcccataaaaatggcgtcggcccgctcggtgatcaccatcggcgcttcgccgggcaggatctcaatgttgccgcaggcgaaatgctggcggttttcgtccagcagctgcagggccgcgggattgcgttcgaccgccgttacctgcagcgaggggtactgcaacgccgcctcaatcgacacgctgccggtaccggcgccgatatcaatcaggtggcttgcccggtgtagctcaagtttggccagcgccagcgcgcgaaccgcctctttggtcatcggcaccttctcgccgcgcagaaaaagctcatctttcatcgaggatcaccaccgcgttcatctcatattcgccgtcgacctcactgaccggtagccagcggatccgctcgttatccatcgccagattttcgccaatcaccatccagcgataccctttaccccgcgccgccagctgggcggcgatttcccgcggcccgcagcgcccatcggtcaccatcgccaccttgcgctggcgagccagctcatcaaaacagacgtcccgcccgtggctgctggtcagccagatatcgttcatatcgataccggccttcgcgcagagatactgcaccgcgctgatgccggggataatgcgcacgcgctcgatgccaaagtgggcgatcagccgcgtaccgatgccgtaaaacagcgggtcgccggaggccagcaccaccaccttctgcgcttcgcgttcgccgagccataacagcagttcggcaatattggcgcccagcgcaaaccgttcgccgtcaaactcagggaactgctgtaaatgccgcttgccgcccaccagcgcgtccgcgctggcgaccgcgtcccgcgccgccggcgtcatcagatgcagacctgacgggcccatgccgaccaccgttaacatgacatctcccgcgcaatgtcggcgatcggccgattgctgccgaggaccttgttatcaaaggagaacatgatggcgtcgcagacgggcggcgttttggtaaagcgcagcatctgcatcacccgcaggcagatgcgttcggcaagatgatgatagatatgctgaaaaccgtacgcgtcgatgtgctccatcgccgcttcggtggtatcgcattcgctcaccagctgcagcagcgccagcggcgcgcccagcagcgccagatgcgcgaccagggtttccatccgcgcatcggcgatatggctgtgggtgtggaagatcccggcggcgactttaatcagcttgccgggatggccaatcagcacgatctggcggaaccccaggcgcacggcctcttcaatcatgtagccgacaaagttgctcatggtgaccaccacctgcgcatcaatgcccatctgctcgcgtacgaagcgctcgccgtggttgcccggcaccagcaccacccgctccagccccgccgcgcgcttaatttccagctccagcgacagcgaacgcttccagctctcctccgacatcggcgtcacgataccggtggtgccgataatcgagatgccgcccaggatccccagccgcgagttataggttttctgcgcccgcgcctcgccttccggggcgaaaatctctaccgtcgccccgcgcgacgggccaatcgcctcgcgcaccgccgactcgatggtgtggcgcggggtgcgattaatcgccgggctgccgatgggcaggccgatccctttgcgggtgaccgtgccgacgccttcgccgccgcgcagggtaatctcgccggaatcgtcgagcgtcacgcgggcgaaaatcagcatcccgtgggtggcgtcaacgtcatcgccgccgtctttacggatggcggcgatcgcctgctgcccttcaacgtgcggcgactcgacgttaaggcacagggtgatgccggaaggggtgacaatggagacctgatgaatcagatgctgacgcatcaccatcagcgccgcgacctttgctgccgccgtggcgcaggatccggtggtatagcctttgcgcagcgccttgccgttgtgccataccggggcgtcaaaggattgctcgctcatcgcgccccctgtaagtggtacaaaatggcgttgacgatggcggcggcgacgttgctgccgcctttacgacccagcgcggcgatgcccggcaggccgctctgcgtcagggcctctttcgactccgccgcgccgacgaaaccgaccggcacgccaatcacgccgttgaccgcgacgtcatgctccagcagacgaaacagcgcggtgggcgcattgccgaaaacaaacaccttctcgccctcttcggcgaccgcgatatcaaccgccgccatcgagcgggtcatcccctgcgctttggcctccgccaccacccgcggatcgctgatatagcagcggcactcgccgccgaatttcgccagcagggttttattgatcccggacagggccatggtggtatcggtataaagcgtgcagggctggctcagggcggcgctcaagcgcggaagcacgtcgggcgaaaaccacaggatatccagccagtcaaaatcagcggtggtgtggatcacccgcttgataatggcttcgtgcagcgggctggcaaagcggtagtccgggcgggtctgcgcaataatgtcgccaataatgtcgaagcttttcgcctcaatcgcctgcggttgctggatatagtgcattcatttgtcctcaggcagcgccgaccagccagtaccggaccgccataaacagcgccagcgccagggtcgaagacacccacatcagtcgaatcgttcgggaaatatcgtctacggaaatatcgcgcgtcgcgtcgccgatccacggtttctccacgcgctgtccaaagtaatcattagggccgccaagccggatgccgagcgccccggcgaccgccgcttccgaccagccgcagttcgggctgctgtggttgtagcggtcgcgccagccgatgcgcagcacgcggccccccgcttcaccgcagaggagagcagcgaggctgataagcagccagctcaggcgggcggggataaagttggcgacatcatcgaggcgggcgctgaccatgccgatggcccgatatttttcgtgcttatagccgaccatcgaatccagggtgttgaccgctttataggccatcgccagcggcgcgccgcccagcagcagaaagaagagcggcgcgataatgccgtcgacggtgttctccgcgacggtttccaccaccgcgcgattaatctgctgcggcgcaagctgcgacgtgtcgcgcccgacgatccacgacagcttgatacggctctccgccagatcccccgcgcgcagcgggcgctcgacgtcccgcgccgactgcgccaggcagcgtccggccagcacggtgaaaatcatccatacctcaaccagccagccaagccacggatgaatcgtccgcgccagcgtcagcacgccccagcagacgctccacgttagcccgaccaccaccagccacatcacggcgccgccgacgcgcagggcgacatcgctgcggcaatagcggcgcacgccgcgctgaacggcggcgatcaggttgcctatccagcgcaccggatgcggccagctctgcggatcgccgatgataaaatcgaggagccaggcaacgccccatgccagcagcgtcatagcgcgctccttgccgcagccagccagtggttgagcatgatgggacgctgcgcaaagtgcaggtgcagatagctggcgaacgtgttgcccacctgccagccgcccgaccactgctgaagggtcataccgtcgcggactttgcggcaggccaggaccgccgggatctccggggtaaaatccgagtagtgaaactcatgcccgcgcagggtttcgccgggcgccgccagcagcgtttgccgcatcgcccgcgcctcgcagtagccaaagcgggtaagccgtttgcccatcttgctgtggccgggaatcagattggccatcgaatagatgtcaccgctggcgtcttcaagggtgctgccgagatacatcaaaccgccgcactcggcgtaaatcgccaccccgcgccgctgcgcctcccgcagctgcgccagcatcgacgtattggccgccagcccggcggcatgaatttctggatagcctccgccgagccaaatcatctggcacggcggaagctcgctatcgcgcagcggactgaagcgcacgatattcaccccgcagcgttcaagcagcgtaaggttatccgggtagtaaaagttgaaggcttcgtcgtcggccagcgccagcgtcaggcccgcgccggcgtcgggcgacggcagcgggggccactccccggcgggtagggcggtgagctggctaagagccaggagccgttcaatatccagcgtttgcgccagcgtttgggcaaaatcgcgccacggctgctgattgaccagcgactcgcgggcggtgaccagccccagatggcgttcgggtaacgccaccccttccacgcgcggtacgtagccgagcaccggcagcccgcaatagcgttcaatggcgcctttgagaagctgataatgggattcgctgttgacgcgattgacgataacgccggcgatattcaggctggggtcgaagtgttgaaatcccatcaccgtggcggcgatggaggtggaaaccgcttttccatctaccagcaaaatgaccggacagccgagctgtttagccatcgcggcggtgctgcagtagccagggtcggtaccgaagccgtcatacagccccatcacgccctcaatgaccgcgatatccgcctgctgcatccgttcgcaaaacagcgcattgagcaccggttccgggagcataaagctgtcgaggttgcgggaagcgacgccgctgacggcggtgtgccagccggtatcgaggtagtccgggccgactttgcagggctgaacccgcataccgcgctgcttcaacaggctgagcagaccaagcgtaacggtggttttaccacaaccgctgccggtacctgcgagaataaatgcgtgctgcctggctgccataccccgatcctgtgccgggtggtagggctgcgtgcattcccagtctttcgactgtacgcatctgagcaacccacttcccaccgaagttgttgattattaccgacaggcaggtcttctggcttagcgtcgtcctctcccatccttcccaatccgctaagcagatcagtggtcatacccgtcatacttcacgttgtatgtgcgttggctttacttgttcaccccagtcacttacctgtgtaagctcctggggattcactcgcttgccgccttcctacaacgcgaattatttagcgtatatatgggttcgtcagcatcacagcagcgggggctgcgggggattcacacccccttccctggcgcctgtcggtttagtccgtcatgattcgagcgggactgcccggctcgcatgatttccggaatatcttacggaagctggatggctcccgtcgtgtttaatttttaattaccaaggccgtttcattacgccgatggcgcgctgaaagccatttcagatatcactctatcccatcaaataaataaaaactggtgcagcttatcgttctctcattattattttgttgcgctatgacaatttattgctctgaatgagatattttcattttagaatgagccagatacaagggcatatcaaaaatcggcaataacaaaatattgtcatttaaaatgactcagtttgtgatctggcgttaatttgctggcgataggcctgcggagtgacctgataagcctggcgaaaaactttgcaaaaatagctggtttgcgaaaatcctaaattccgcgcaatgctggcgatgctccagtcgctgtggcaaagcagctctttggcgctcaccatccgctgatggttcacccacgcgttaaaaccgataccctgatattttttaaatagcttactgaagtaataggggctgagataaacgtgggcggcgacgtcttccaggcgaagctcatcggataaatgggcgtcaatgtagcgcagcgctttcttcattttgctgtcgtgagggctggcgacccggctggcgcgcgcgggttccggctgctggggattatctttaatcaccacaaagttgagctgctttttcaggcagttctcgacgatcagcttcagtaaatccgcggaggcaatcactctggagtagtccatctccggcacgtcgcggaacgcgttgagcagctcggggtccgcctgccagccgtcgtccacgttgaggatatccaccagttctacatcgttgcttaagcgcacctgcccgcatagcacgaagcccacaaggtgcccggcgataaccagaggaatggaaaaatcggttaacccggcgtggcagcggtagatacagagctgatcggtttttgacgcctcgaggccgccgcagcggtcgctcatccggcagcgggtgctgtgctgagggtgctggcgcatcagctggcagaaaggggtgaagttaaacagttcagatatttcatcaccgtgaatattgacaaccacaaccgccagactggtggcctgcgcaaaatcctgtgcgattttattaatgagttctgagttcagtgtgctcgcagaaatcatgataaaacctctcagttaattttttgttataaataaaacatttctttaatatttacttcctttcatcatcaattgccgccaacgataaaagaataatacgatagcaaaagtctcccatccgtgggagacgtttttggccagttcgtgataccggttcatgaaaatttttcgctatttcagcggatgcattaatcctctaatttacaggtattacacggtaagttatttcctatcagataacgatagatggccgcgccgaggcaggcaccgatcagcggcgcaataatcggcacaataaagtacggaatatcccttccgccggtcatcgcgatatcgccccagcccgccatccacgtaaacagcttcggcccaaaatcacgcgccggattcatcgcaaagccggtcagcggcccggttgacgcgccaatcaccgccaccagcaggccgatcagcagcggggccagcggccctttcggcacgccgttgccgtcgtcggtcagcgccataatcatccccatcagcatggaggtgatcaccacttcgaccagcgccgcgtgccagatgctcagcgaggccgccgggtaggtgctgaaaatactcgccagctgcaggctctcaacgctgccgcgagcgatatggtgggcggattcaaactcggtaaacatagtgctgtacagcacataggccagcaccgcgccgccgaaggcgcccgcgacctgggagacaatataggggaagactttgcgcccgggaaaacaggcaaatagccataacgcaacggtcaccgccgggttgagatggccgccggatattcccgacgtcagatagacggcaagcgagatccccagaccccagataatgcatatctcccacagtccgaggctggctcccgccacctttaacgcgctcaggcagccgatgccgaaaaacaaaaacagcccggtgcccagaaactcggcggtacattgcgcttttaacgaatcattcatggtgacaccttcttagcagagttcgtgtcctgaccagccaacctcctgctggcagtagagtacaacgggcccactatatgaactccgctccgcaaattgttggcaacctgctgacggcggccccggaaaattcgggcatcaataacaaattattgtcattgaataactcaaaatagcattgctcacgcgcggatttcgcaattacgccatcgccatgacatgcaaaaatattgctaaaaccaactcatcgttttccaacaaacatcacaaatcagtttttctcgcatagcagataaaattaaattcgtcatgaacaaatttgtaaatatggaatatacaaaacaagataatcacataacaataaataaaaacaacaattaaaatcaataaattaaatttacgtttagcaattttatattattcaatacccactattttttcaccatcaaattcaagtcagccattctttttcctcgcatcttcttatagtcccaactatcggaacactccatgcgaggtctttatgcaacaagaagcactaggaatggttgaaaccaaaggcttaaccgcagccatagaggccgctgatgcaatggttaagtcagccaatgtgatgttagtgggctatgaaaagattggctccggactggtgaccgtcatcgtacgcggcgacgttggcgcggtaaaagcggccaccgatgcgggggccgccgccgcacgtaatgtgggtgaagtgaaagccgtacacgtcatcccacgcccccacaccgatgtagaaaaaatcttaccgaagggaattagccaatgagcagcaatgagctggtggaacagatcatggctcaggtgattgcccgcgtggcaacgccggaacagcaggccatccctactgaaaaccatccaatacgagagacggctatggcagaaaaaagctgcagtttaacggaatttgtcgggaccgccattggcgacaccctgggtctggttatcgccaacgtcgataccgccctgctggacgcgatgaagcttgaaaagcgctatcgctccatcggcattctcggcgcccgcaccggcgcaggcccgcacattatggcggcggacgaagcggtgaaagccaccaataccgaagtggtcagcattgagctgccgcgcgataccaaaggcggagcgggccacggttcgctgattattttgggcggtaacgacgtttccgacgttaagcgcggtatcgaagtcgcgctgaaagagctcgaccgcacctttggcgatgtttacggcaacgaagccgggcatatcgagctgcagtacaccgctcgcgccagctacgcgctggaaaaagccttcggcgcgccgattggccgggcctgcggcatcatcgtcggcgcaccggcctccgtgggcgtgctgatggccgataccgccctgaagtcagccaacgtggaagtcgtggcctatagctctccggcgcacggcaccagcttcagtaacgaagccattctggtgatttccggcgactccggcgcggtccgccaggcggtcacctccgcgcgcgaaatcggcaaaaccgtccttgcgaccctcggtgctgaaccgaaaaacgatcgcccgtcctacatctgatacccacgaggctgattcatgagatcgaaaagatttgaagcactggcgaaacgccctgtgaatcaggacggcttcgttaaggagtggatcgaagaaggctttatcgcgatggaaagcccgaacgacccaaaaccgtcgattaaaatcgttaacggcgcggtgaccgagctggacgggaaaccggtaagcgattttgacctgatcgaccactttatcgcccgctacggtatcaacctgaaccgcgccgaagaagtgatggcgatggattcggtcaagctggccaacatgctgtgcgatccgaacgttaaacgcagcgaaatcgtcccgctgaccaccgcgatgacgccggcgaaaattgtcgaagtggtttcgcatatgaacgtcgtcgagatgatgatggcgatgcagaaaatgcgcgcccgccgcaccccgtcccagcaggcgcacgtcaccaacgtcaaagataacccggtacagattgccgccgacgccgccgaaggggcatggcgcggatttgacgaacaggaaaccaccgttgcggtagcgcgctatgcgccgttcaacgccatcgcgctgctggtgggctcgcaggtaggccgtccgggcgtgctgacgcagtgctcgctggaagaagccaccgagctgaagctcggcatgctgggccacacctgctacgccgaaaccatctccgtctacggcaccgagccggtctttaccgacggcgacgacacgccgtggtcgaagggcttcctcgcctcgtcctacgcctctcgcgggctgaaaatgcgctttacctccggctccggctcggaagtgcagatgggctacgccgaaggcaaatccatgctttatctggaagcgcgctgcatctacatcaccaaagccgcgggcgtacagggtctgcaaaacggttccgtaagctgcatcggcgtgccgtctgcggtgccttccggcattcgcgcggtgctggcggaaaacctgatctgttcgtcgctggatctggagtgcgcctccagcaacgaccagaccttcacccactccgatatgcgtcgtaccgcgcgcctgctgatgcagttcctgccgggcaccgactttatctcctccggttattccgcggtgccgaactacgacaacatgttcgccggctccaacgaagatgccgaagactttgacgactacaacgtcatccagcgcgacctgaaggtggacggcggtttgcgtccggttcgcgaagaggacgtcatcgccatccgtaacaaagccgcccgcgcgctgcaggccgtgtttgccggaatggggctgccgccgattaccgatgaagaagttgaagccgcgacctacgcccacggttcgaaagatatgccggagcgcaacatcgtcgaagacatcaagttcgcccaggaaatcatcaataaaaaccgcaacggtctggaagtggtgaaagcgctggcgcagggcggattcaccgacgtggcccaggacatgctcaacatccagaaagctaagctgaccggggactacctgcatacctccgcgattatcgtcggcgacgggcaggtgctgtcagccgtcaacgacgtcaacgactatgccggtccggcaacgggctatcgcctgcagggcgaacgctgggaagagattaaaaacatccctggcgctcttgatcccaacgagattgattaaggggtgagaaatggaaattaatgaaaaattgctgcgccagataattgaagacgtgctcagcgagatgaagggcagcgataaaccggtctcgtttaatgcgccggcggcctccgcggcgccccaggccacgccgcccgccggcgacggcttcctgacggaagtgggcgaagcgcgtcagggaacccagcaggacgaagtgattatcgccgtcggcccggctttcggcctggcgcagaccgtcaatatcgtcggcatcccgcataagagcattttgcgcgaagtcattgccggtattgaagaagaaggcattaaggcgcgcgtgattcgctgctttaaatcctccgacgtggccttcgtcgccgttgaaggtaatcgcctgagcggctccggcatctctatcggcatccagtcgaaaggcaccacggtgatccaccagcaggggctgccgccgctctctaacctggagctgttcccgcaggcgccgctgctgaccctggaaacctatcgccagatcggcaaaaacgccgcccgctatgcgaaacgcgaatcgccgcagccggtcccgacgctgaatgaccagatggcgcggccgaagtaccaggcgaaatcggccattttgcacattaaagagaccaagtacgtggtgacgggcaaaaacccgcaggaactgcgcgtggcgctttgataaaggataactccatgaataccgacgcaattgaatcgatggtacgcgacgtattgagccgcatgaacagcctgcagggcgaggcgcctgcggcggctccggcggctggcggcgcgtcccgtagcgccagggtcagcgactacccgctggcgaacaagcacccggaatgggtgaaaaccgccaccaataaaacgctggacgactttacgctggaaaacgtgctgagcaataaagtcaccgcccaggatatgcgtattaccccggaaaccctgcgcttacaggcttctattgccaaagacgcgggccgcgaccggctggcgatgaacttcgagcgcgccgccgagctgaccgcggtaccggacgatcgcattcttgaaatctacaacgccctccgcccctatcgctcgacgaaagaggagctgctggcgatcgccgacgatctcgaaagccgctatcaggcgaagatttgcgccgctttcgttcgcgaagcggccacgctgtacgtcgagcgtaaaaaactcaaaggcgacgattaacttctctaagtaattcgagatgcattgaggcggcaagtgagtgacaaattcgtctggaacgaatttgaacagccataggctggctttagtgagggacagggatgtccctcataaccccgatgagcttactgtagtaagtgattcgggtgaaagaacgcagccaacaaaaaggcagtttgaagtacgacgagaaaaggggcatgtgatgcgatatatagctggcattgatatcggcaactcatcgacggaagtcgccctggcgaccctggatgaggctggcgcgctgacgatcacccacagcgcgctggcggaaaccaccggaatcaaaggcacgttgcgtaacgtgttcgggattcaggaggcgctcgccctcgtcgccagaggcgccgggatcgccgtcagcgatatttcgctcatccgcatcaacgaagcgacgccggtgattggcgatgtggcgatggaaaccattaccgaaaccatcatcaccgaatcgaccatgatcggccataacccgaaaacgcccggcggcgcggggcttggcacaggcatcaccattacgccgcaggagctgctaacccgcccggcggacgcgccctatatcctggtggtgtcgtcggcgttcgattttgccgatatcgccagcgtgattaacgcttccctgcgcgccgggtatcagattaccggcgtcattttacagcgcgacgatggcgtgctggtcagcaaccggctggaaaaaccgctgccgatcgttgacgaagtgctgtacatcgaccgcattccgctggggatgctggcggcgattgaggtcgccgttccggggaaggtcatcgaaaccctctctaacccttacggcatcgccaccgtctttaacctcagccccgaggagacgaagaacatcgtcccgatggcccgggcgctgattggcaaccgttccgccgtggtggtcaaaacgccatccggcgacgtcaaagcgcgcgcgatacccgccggtaatcttgagctgctggcccagggccgtagcgtgcgcgtggatgtggccgccggcgccgaagccatcatgaaagcggtcgacggctgcggcaggctcgataacgtcaccggcgaatccggcaccaatatcggcggcatgctggaacacgtgcgccagaccatggccgagctgaccaacaagccgagcagcgaaatatttattcaggacctgctggccgttgatacctcggtaccggtgagcgttaccggcggtctggccggggagttctcgctggagcaggccgtgggcatcgcctcgatggtgaaatcggatcgcctgcagatggcaatgatcgcccgcgaaatcgagcagaagctcaatatcgacgtgcagatcggcggcgcagaggccgaagccgccatcctgggggcgctgaccacgccgggcaccacccgaccgctggcgatcctcgacctcggcgcgggctccaccgatgcctccatcatcaaccccaaaggcgacatcatcgccacccatctcgccggcgcaggcgacatggtgacgatgattattgcccgcgagctggggctggaagaccgctatctggcggaagagatcaagaagtacccgctggctaaggtggaaagcctgttccatttacgccacgaggacggcagcgtgcagttcttctccacgccgctgccgcccgccgtgttcgcccgcgtctgcgtggtgaaagcggacgaactggtgccgctgcccggcgatttagcgctggaaaaagtgcgcgccattcgccgcagcgccaaagagcgggtctttgtcaccaacgccctgcgcgcgctgcgtcaggtcagccccaccggcaacattcgcgatattccgttcgtggtgctggtcggcggttcgtcgctggatttcgaagtcccgcagctggtcaccgatgcgctggcgcactaccgcctggttgccggacggggaaatattcgcggcagcgagggcccccgaaacgcggtggccaccggcctgattctctcctggcataaggagtttgcgcatgaacggtaatcacagcgccccggccatcgcgatcgccgtcatcgacggctgcgacggcctgtggcgcgaagtgctgctgggtatcgaagaggaaggtatccctttccggctccagcatcacccggccggagaggtcgtggacagcgcctggcaggcggcgcgcagctcgccgctgctggtgggcatcgcctgcgaccgccatatgctggtcgtgcactacaagaatttacccgcatcggcgccgctttttacgctgatgcatcatcaggacagtcaggcccatcgcaacaccggtaataacgcggcacggctggtcaaggggatccctttccgggatctgaatagcgaagcaacaggagaacagcaggatgaataacgcactgggactggttgaaacaaaagggttagtgggcgccattgaggccgccgatgcgatggtgaaatccgccaacgtgcagctggtcggctacgaaaaaattggctcgggcctcgtcaccgtgatggtgcgcggcgacgtcggcgcggtcaaagcggcggtagacgcgggcagcgcggcggcgagcgcggtgggcgaagtgaaatcctgccacgtgatcccgcgtccgcacagcgacgttgaggccattttaccgaaatcagcctgattgatggcgaataaggagcaccgcgtgaagcaatcactgggattacttgaagtttgtggtctggcactggctatcagctgcgccgatatcatggcgaaatccgcttctatcacgctggtcgccctcgaaaagaccaatggttcaggctggacggtgattaaaattaccggtgatgtggcctccgtgcaggcggccatcaccaccggcgcacagtttgccgggcagcgaaacggcctggtggcccacaaagtcatcgccaggcccggagaagggatcctgcgcgcggaggctcccccgccctccgtcatgcaacctgaacctgaagcgtcagggacggctgatgtcgtttcgccagcgccagcagaagagcttccccagcaacacggcgtggtcagctgcaacctgtgcctcgatccaaaatgtccacgccagaagggtgagccgcgctcgctttgcattcatcccggcaagcgaggtgaagcgtaatggataaacagcttctggaatcaacggtcagcaaagttctcgacgagatgcggctacgccccatcccgctgggggtttcaaatcgtcatatccacctgtcggcggcggattacgaacgcctgttccccggccatcccatcagcgagaaaaaggcgctactgcagccgggacagtacgccgcggagcaaaccgtcaccctggtggggccgaaggggcagcttaaaaatgtgcgcctgctcggtccgctgcgctcggtaagccaggtggaaatctcgcgtaccgatgcccgaaccctgggggttgcggcaccgctgaggatgtccggcgatctgaaagggacaccgggcatccgcctggtcagcccttttggcgagctggagctggcgtcaggggttatcgtcgcgcagcggcatattcatatgtcgccgctcgatgcgctgatcctgcgggtcgcccacggcgacagagtttcggtggccattgaaggcgacgcgcgcgggctgatcttcaacaacgtggcggttcgcgtttcgccggatatgcgcctcgaaatgcacatcgataccgatgaagccaacgccgccggcgccgataacccgcaggtctttgcccggctggtaggcccgcgatgaacggcgaagttctgcagcgcatcgtgggggagattgtctcccggctgcagcgtcgcgcccatagcacggcgacgctgagcgtggcgcaattgcgcgatgccgactgccggagcctgttctgccagcacgcgtcgctgcgcattctgctcgttgacctgcccctgctgggccagctgacggaggcggaaaccgacgatcccgcggcccgcaacattcacgacgcgctggcttttggcctccgcgtacagctcaccctgcaccgccagctgctgccggttatcccggttaaaaaactggcccgcctgccggtgaacttcaccgacgagcgcggagtgccgctgatcctgcacgcgggttcggtgctgagctatcgcgacgtcgcgccgctgggccaggggcgcctggttatccaccgcaaatgcctcgtgaccgcgctggcgcgcgacgcggcgcaggcgcggaatattgaactcattaagcaggagtaaatcatgcatctggcacgagtcacgggcgcggttgtctccacgcaaaaatcgccttccctggtcggcaaaaagctgctgctggtgcggcgggtcagcgccgatggcgagctccccgcctcgccgacctccggcgatgaagtcgccgtggattccgtcggcgcgggggttggcgagctggtgctgctcagcggcggctccagcgccaggcacgttttttccgggccaaacgaggccatcgacctcgccgttgtcggcattgtcgatacgctttcacgttaaggagcgactatggcgatttatacccgaacgggcgacgctggcaccacctcactctttaccggccagcgggtgagcaaaacccacccgcgggttgaagcctacggcacgctggatgagctgaacgccgcgctgagcctgtgcgcctgcgccgccgcggataaacaccaccgcgccctgctcgaagctatccagcagcaaattttctggtttagcgcagaactggccagcgacagcgaacggccgtcgccgaaacagcgctacatcagcagcgaagatatttccgctctggaagccgctatcgatcgggccatggcccgcgtcgaaccgctgcacagctttattttacccggccgctgcgaagccgcgagccgcctgcattttgcccgcacgctggcccgccgggccgaacgccggctggttgagctggcggcggaagtcaacgtgcgccaggtgctgatgcgctacatcaatcgcttatcagactgcctgtacgccctggcgcgcgcggaagatagcgatgcgcaccagaacaacatcatccgcgaagtgagccggcgctatctggccgccagccagccgagccgcagcaaggagacgacgcccgtggccctctcattccacgatctgcaccagctcacccgcgccgccgttgagcgcgcgcagcagctaaaggtgccggtggtgatcagcatcgttgacgcgcacggcaccgaaaccgtgacctggcggatgccggacgctctgctggtcagcagcgagctggcgccgaaaaaggcctggaccgcggtggcgatgaaaacggcgacccatgagctgagcgacgccgttcagccgggcgccgcgctttatggcctcgaaacgcatttacagggaaaagtggtcacctttggcggcggttacgccctgtggcgcgacggcttattaatcgggggtcttggcatcagcggcggcagcgttgagcaggacatggacatagcactggccgccatcgcggccattaacgtgggaactcatcaatgaatacttccgaactcgaaacccttattcgcaccattcttagcgaacagttaaccccggggcaaacgccggtccagccgcagggcaaagggatttttcagtccgtcagcgaggctatcgacgccgcgcaccaggcgttcttacgttatcagcagtgcccgctgaaaacccgcagcgccatcatcagcgcaatccgtcaggagctgacgccgcacctggccgcgctggcggaagagagcgccaatgaaacggggatgggcaacaaagaagataaactcttgaaaaacaaggccgcgctggacaacacgccgggcgtggaagatctcaccaccaccgcgctgaccggcgacggcggcatggtgctgtttgagtattcgccgtttggcgttatcgggtcggtcgcgccgagcaccaacccgacggaaaccatcatcaacaacagcatcagcatgctggctgcgggcaacagcgtctatttcagcccgcatccgggagcaaaaaaggtctctctgaagctgattagcatgattgaagagattgccttccgctgctgcggcatccgcaatctggtggtcaccgtggcggaaccgacgtttgaagccacccagcagatgatggcccatccgcgcattgcggtcctcgctatcaccggcggccccggcattgtggcgatgggcatgaagagcggtaaaaaagtgatcggcgccggcgcgggcaacccgccctgcatcgtcgatgaaacggcggatctggtcaaagcggcggaagatatcatcaacggcgcctcgttcgattacaacctgccctgcattgccgagaagagcctgattgtggtggagagcgtcgccgaacgtctggtgcagcaaatgcaaaccttcggcgcgctgctgctgagccctgccgacaccgacaaactccgcgccgcctgcctgccagagggccaggcgaataagaaactggtcggcaaaagcccatcggccatgctggaagcggccgggatcgccgttccggcgaaagcgccgcgtctgctgatagcgctggttaacgccgacgatccgtgggtcaccagcgagcagctgatgccgatgctgccggtggtgaaagtcagcgatttcgatagcgcgctggcgctggcgctgaaggttgaagaggggctgcatcataccgccattatgcactcgcaaaatgtctcgcgcctgaacctcgcggcccgcactctgcaaacctcgatattcgttaagaacggcccctcttatgccgggattggcgtcggcggcgaaggctttaccacctttactatcgccacgccgaccggtgaaggcacaacctcggcgcgcacctttgcccgctcccgtcgctgcgtgctgaccaacggcttttccattcgctaaccgaggtcgcgatgaagactttctcactacaaacgcggttgtacagcggtcagggtagcctggctgtgctcaggcgctttacccacaagcatatctggatcatctgcgatggctttcttgcgcgctcgccgctgctggaaaccctgcgtcaggcgttgcccgcagataaccgcatcagcgtctttagcgagataaccccggaccccactatccataccgtggtgcagggcattgcgcaaatgcaggccctgcagccgcaggtggtcatcggcttcggcggcggctcggcgatggacgcggcgaaagccatcgtctggtttagccagcagagcggcatcaatatcgaaacctgcgtggcgataccaaccaccagcggtaccggttcggaagtgaccagcgcctgcgtgattagcgacccggataaaggcatcaagtatccactgttcgacaatgcgctctatcccgatatggcgatccttgacccggatctggtggtcagcgtgccgccgcagattacggccaacaccggcatggacgtgctgacccacgcgctggaagcgtgggtctctccgcacgccagcgactttaccgacgcgctggcggaaaaagccgccaggctggtgtttcagtatctgcccacggcggtggaaaaaggcgactgcgtggcgacgcgcgggaaaatgcacaatgcctcaacgcttgccgggatggcgttcagccaggcggggctggggcttaatcacgccatcgcccaccagcttggcgggcagtttcatctgccgcacgggctggccaacgcgctgctgttaaccgcggttatccgctttaacgccggtcatccgcgcgccgcaaaacgctacgcccggctggccaaagcctgcggcttttgtccggcagacgccagcgatagtacggcgatcaatgcgctgatccagcaaatcgaacggctcaagcagcgctgcgcgctgccgtcactggcggtcgcgctgaaagagggacgatcccagtactcagcgcgtatttcggcaatggtgcaggccgcgctggctgacgtgacgctacgcaccaatcctcgcccggccagcgccggggagattcaggaactgctggaggatctgctatgagtaccgccgtcaacgctgctgaaatggcctggagcgccgaggagatccgcgagcgcgtgcgcgcggcgggcgtggtcggcgcggggggcgcggggtttcccgcccacgtgaagctgcaggcgcaggtagagatttttctggtgaacgccgccgagtgcgaaccgatgctcaaggtcgaccagcagctgatgtggcagcaggctgcgcgtcttgtccgcggcgtgcagtacgcgatgacggcaaccggcgcgcgcgaaggggtgattgccctgaaagagaagtaccgccgggctatcgatgcgctcaccccgctgctgcctgccgatattcgcctgcatattctgccggatgtctatcccgcaggcgatgaggtgctgactatctggctggctaccggtcgccgggtcgcgcccgccgcgctgccggccagcgtcggggtcgtggtgaataacgtgcaaacggtgctcaatattgcccgcgcggttgagcagcagtttccggtgacccgccgtacgctgaccgttaacggcgcggtcgcccggccgctgaccgtcaccgtccccatcggcatgtcgctgcgcgaagtgctggcgctggcgggcggcgcgacggtcgacgaccccggttttattaacggtggcccgatgatgggcggcctgattacctctctcgatagcccggtgaccaaaaccaccggcggcctgctggtgctgccgaaaagccatccgcttatccagcggaggatgcaggatgagcgcacggtgctttccgtggcccgtaccgtctgcgagcagtgccgactgtgtaccgatctctgcccacggcatctgattggccacgaactctccccgcacctgctggtgcgggcggtgaactttcatcaggccgccacgccccagctgctgctgagcgccctcacctgctcggagtgcaacgtctgcgaaagcgtggcctgcccggtggggatctcgccgatgcgcatcaaccgcatgctgaaacgcgagctgcgggcgcaaaaccagcgctatgaagggccgctctatccggccgacgaaatggcgaaatatcgcctcgtgccggtgaagcggctgatcgccaaactggggctgagcccctggtatcaggaggcgccgctggtggaggacgaaccggcagtagaaaccgtgacgttgccgctgcgccagcatatcggcgccagcgcggtagcgaacgttgcggtgggagagcgcgttacgcgcgggcaatgcgttgccgatatcccggcaggcgcattaggcgcgccgattcacgccagcatcgacggcgtggttgcggccatcagcgaacaggccatcacggtggtaagaggttaaccatgtctcaggctataggaattttagaactcaccagcattgccaaaggaatggaactcggcgatgcgatgctgaaaagcgccaacgtcaatctgctggtcagcaagactatctgcccgggtaagtttttattgatgctcggcggggatatcggcgctatccagcaggctattgaaaccggtgcctcgcaggccggcgaaatgctcgtcgacagcctggtgctggcgaatattcaccccagcgtccttccggccatcagcggcctgaacagcgtggacaagcgccaggcggtcggcatcgttgaaacctggagcgttgcggcctgcatcagcgccgccgatcgggcggtaaaaggctcaaacgtcacgctggtgcgggtgcatatggccttcggcatcggcggtaaatgctacatggtggtggcgggcgacgtttccgacgtcaacaacgcggtcacggtagccagcgaaagcgcgggcgaaaaagggctgctggtttaccgttcggtgatcccgcgcccgcatgaagccatgtggcgacagatggtggagggataatggaaagacagccgaccacggatcgcatgattcaggaatacgttcccgggaaacaggtgaccctcgcgcacctgatagccaaccccgggaaagatctctttaagaagcttggcctgcaggatgcggtttccgccatcggcatcctcaccattacgcccagcgaggcgtcgattatcgcctgcgatatcgccaccaaatccggcgcggtggagatcggttttcttgaccgctttaccggcgccgtggtgctgaccggcgacgtttccgccgtcgagtacgccctcaagcaggtgacgcgcaccctgggcgagatgatgcagtttactacctgctcaataacccggacgtagcgcgatgaaacgtctgatgtttatcggccccagccagtgcggcaaaacctcgctgacccagggcctgcgcggcgaagcgctccattacaagaaaacccaggcgattgaatggtcgccgatggccatcgacacgccgggcgaatatctggagaaccgctgcctttatagcgctctgctgaccagcgcctgcgaggccgacgttatcgctctggtgctgaacgccgacgcccagtggtcgccgttttctccgggttttaccgccccgatgaaccgcccgacgattggcctgatcaccaaagccgacctggccgacccgcagcggttatcgctcatcgaggagtggctcaggcaggctggggcgcagcagatttttgtcaccagcgcgctgaataatctgggtcttgatgccgtgctggattttctgaattcgaaggaacctctatgtcttacaaaataatggccattaatgccggcagctcatcgttaaaattccagctgctggagatgcctcagggcgatatgctctgccagggattgattgaacgtatcggcatggcaaacgcccaggtgaccctcaaaacgccggcgcaaaaatggcaggagacggcgccgattgccgatcaccgcgaagcggtcaccctgctgctggaaaagctcctcgaccaccggattatccagagtttgcaggatattgacggcgtcggccaccgcgtggcgcacggcggagagcgctttaaagattcgacgccggtcaccgatgataccttagcggaaatcgagcgcctggcggagctggccccgctgcacaacccggtcaacgcgctgggcattaacgttttccgccagctgctgcccgaaacgccgtcggtggcggtatttgataccgcttttcaccagacgctggacgagcgcgcctttatctatccgctgccgtggcgctactacagcgagctgggcattcgccgctacggcttccacggcaccagccataagtacgtcagtacgacgctggcggaaaagctgggcgtgccgctgagcgccctgcgcgtggtgagctgccatctcggcaacggcagcagcgtatgcgcaatcaaaggcgggcgctcggttaacacctcaatgggctttacgccgcagtccggcgtgatgatgggcacccgcagcggcgatatcgatccgtcgattctaccgtggctggcgctgcataaggggcaaacgccggagcagcttaatcagctgctgaataacgaatccggcctgctgggcgtttccggcgtgtcgcacgattatcgcgatgtcgagcaggcggcggacagcggcaatcgtcgggcggctctggcgctctcgctgtttgccgagcgcatccgcgccaccatcggcagctatattatgcagatgggcggcctggacgcgctgatctttaccggcggcatcggcgaaaactccgcccgcgccaggagcgccatctgccataacctgaatttcctcgggctgtcggtcgatgaagagaaaaaccagcacaatgccacctttatccaggccgagaatgcgatggttaaagtggcggtcatcaataccaatgaagagctgatgattgcccgcgatgtgatgcgcctggcgcttcccgaagcgcagacgttaaccgtttcagcctgagctcgccgcccggcaagttgcggtgaatcatggtaatagccggatcggcatgacactatgcgcttaaaattctgaaactttaccctaaataattcaagttacaggacaaagcacttgtgctttgtcccgtagcttgaagtataacgggtaaaaaggtgaatacgtggccgtagcgcaatgccccgcctcctgcggggaactcatccagggctggatcctcggcagcgagaagctggtctcctgccccgttgactggtacagcaccgtcgaggtggactacggttcgcctcgggcggatgaacgtccgctggcgcgggcgatggtcgaccggctgctgagctactggcgctatccggcggagctcggcaaagagattcggatcgatatttgctccacgattccggtcgccaaggggatggccagcagcaccgcggacattgctgcgacggcggtggccaccgcgcatcatctcggccatccgctggacgagcccaccctcgcccgactctgcgtctccctggagcccaccgacagcaccctgttccgccaactgaccctgttcgaccacaacaccgccgccacgcagattgcctgcggcagccagccgcagctcgatctgctggtgctggaaagccccgccacgctgctgaccaccgattaccaccgccttccccggcttgagcagctgcacgcccattccgccgccctgcagcaggcctgggagaaagttcagctggcctgcgagacggataatccgcggcggatgggagaggccgcgacgctcagcgccatcgccagccagcatctgctgccgaagccggggtttgatacgctacgggggctggtggaagagtgcgatttatacggtattaacgtggcgcacagcggcagcgtggtcggcctgatgctcgaccgtcagcgtcacgatattgagtatttgcagcgacggctgggagagacgcggcttagcgagctctggccccggcagcacctgctgcgcatggtgcagggcggcgtcgaactgcgctaacgcttccgcagccatgccccgggttgcggcgctgcgcgccttacccgggctaccggcccgcagacggctgtaaacccgtagcccggataagcgcagcgcgagccggggagaagaccgcaacaaaacctcatgctgtgcatcttccccggaggcggcgctgcgcgccttacccgggctaccggcccgcagacggctgtaaccccgtagcccggctaagcgcagcgcgagccggaaagaagccgcaccgatgtattcatcccggcgcattccccgggttgcggcgctgcgcaccttacccgggctaccgacccgcagacggctatgaacccgtagcccggctaagcgcagcgcgagccggggagaagccgcaccgatgcattcatcccggcgcattccccgggttgcggcgctgcgcaccttacccgggctaccgacccgcagacggctatgaacccgtagcccggctaagcgcagcgcgagccggggagaagaccgcaacaaaacctcatgctgtgcaccttccccggaggcggcgctgcgcgcctgtccgggctaccggaccgcagacggctgtaaccccgtagcccggctaagcgtagcgcgagccgggaagaagaccgcaacaaaacctcatgctgtgcaccttccccggaggcggcgctgcgcgcctgtccgggctaccggcccgcagacggctatgaacccgtagcccggctaagcgcagcgcgagccggggagaagaccgcaacaaaacctcatgctgtgcaccttccccggaggcggcgctgcgcgcctgtccgggctaccggcccgcagacggctatgaacccgtagcccggctaagcgtagcgcgagccgggaagaagaccgcaacaaaacctcatgctgtgcaccttccccggaggcgggctaccggcccgcagacggctgtaaacccgtagcccggtcagcgcagcgccaccgggagaaccgcagaagaacaatggcggcagacatctactcgttaaatatccgcctgaaggccgccagcagccgggtattttcctgctggctgcggatcgcgacgcggaagtagcgcccgtcgagccccgggtagttggcgcagctgcggatcaggatgtgctgttgcagcatcccgtattgcagatccagatccgccacgtcgcagcgcagaaacagatagtttgcccgcccgggatagaccgtcaggccgggaatatggcgcagctgatggtaaaagcgctgcccctcctccgccagccactgccaggtttgctgctggtaggcgctatcctggagaatgatctcccccgccagggcggcaaacgcgtttatcgaccacggcatctggcgctcgcgcattctcgccaccgcccgcgcatcgccattgaccagataccccagacgcaggccgggaatggcataaaacttggtcagcgaacgcagcacccacacgtgcgggttgtggcccagcagcggaataaatcccggctcgtcggggataaaatcgataaacgcttcatcgagaatcagggcaatgcccagcgaccgacagcgttcagcaatcatctccagcagacggcgctcgggcagcaggccggtaggattgttcggcgtgcagagaaataagcagtccagatccggcgtcagggcgtcaagaatcgccccggtgagctgccagccatccgcctcgcgcagcagaaattcccgcaccgcgcagtccaccgactgcagcgcccggcggtattcggcaaagcccggggtgacgatcatcgcctggcgcggcttcagcccctgaaccagcgtaaagatcgcttcggtttcgccgtttccggcgaggatccacgaggcggggatctgatggtgttccgccagcgcaaggtgcagctgctgatactcaacgtcagggtagcgttcggcgcaggccatattgtcgaggatggcgcgctttaaactttccggcatccccagcggattaatattggcgctaaaatccagcagctgcgccgcagagatgcccataagcgcggcggcctcgcggatattaccgccgtgcgcgctctttaatagagccatttcactttcctgttgcgttaccctcgccttgccagcgtcgcgccgtcggcgaagtaggctttaatccctgccagaatcgactctgcaacttcctgctggaatttcgccgttttcaatttacgctcttcttcgacgttactgataaacgcggtttccaccagaatcgatggaatatccggcgccttcagcaccgcgaagcccgcctgctcaacccggttcttgtgcaggttattaatgttgcccatcttttccagcaccgccttgccgaacttcaggctgtcggcgatcgtcagcgactgcaccatgtcgaacatcgtgtggtcgacgtagcgatcgccgcttttgctgacgccgccgatcaggtccgaggcgttctgggtctgcgccagatatttagccgcggtactggtggcccctttggttgacagggcaaacaccgacgatccgctgggctggcggctggtaaacgcgtcggcgtgaatagagacaaacaggtcggcgcgctgcttctgcgctttggcgacgcggaccttcagcgggataaagacatcctcgttgcgggtcatatagaccttcatattgccctctttctcgatcagcgcgcgcagccgccgggcaatctgcagcaccacgtctttctcgcgggtgcggtattttcccaccgcgccggagtcttcgccgccgtggccgggatcgagcatgataacgataggccgatcgcgcccggctttacccggtttaggcccgctctccgcaggcggaacctgccgctgcagatcgcctttgttgtaatcttcgagcagcgccagcagcggatcctgcacgtcggtggcgttagcgggatagaggtccatgaccagtcgctctttaaacccggcgaccggagccagcgcaaacagctgcggtttcacgttctgtttcagctcaaacaccatgcgcacggtttgcggatcgaactgccccacgcgagcggattgaatatagggatcgtcaccgcgaatctgactccccatacctttcagtacggagttgagattaaccccttccagatccaccaccacacgttcaggattgctgagcgcaaactgccgatatttcaggatatggttggactccacggtgacgcgcgtgtaggtcgatgatggccagacgcgtacggcaaccacctgcgccgcggctgccaacccaaccggactcacactcattaaccacatggcgcccgccccctgtaaaaatcggcggcggcttaatcctgacttgtatcccgacatgccactcccaagcagtaagaaatcattcgtatttaaaacaaacagattgaccggaaactttaacgaaaggcgcataacctgtcatctataaaagggtaaacaatctttgacaccctgatttggctcacactgttttcccggctcagccaaaaattggggcttgcgtttgccggcgaaacagaataaaaatacagtaattacgaataatcatgcattgaggttgtgtcatggtgaaggaacgtcgcaccgaactggtagagggattccgccattctgtcccctatattaatgcccatcggggtaaaacgtttgtcatcatgctgggcggggaagccatcgagcatgataatttctctagtatagtcaatgacattggcctgcttcacagcctggggattcgtctggtggtggtctatggcgcccgcccgcagatcgatgccaacctggcggagcatcgtcacgagccggtttatcataaacaaacccgagtgactgacgccaaaacgctcgagctggttaagcaggcggcgggcatgctgcagctggaaattaccgctcgcctgtcgatgagcctcaacaacacgccgctgcagggcgcccatatcaacgtggtcagcggcaacttcattatcgcgcagccgttaggcgtggatgacggcgtagactactgccacagcgggcgcatccggcgcatcgatgaagaagccattcaccgccagctggataacggcgcgattgtgctgatgggcccggttgcggtgtcggtcaccggcgaaagttttaacctgacctccgaagagattgcgacccagctggcgattaagctgaaagccgaaaagatgatcggcttctgctcatcgcagggggttcacaatcaggatggcgagatcgtccctgagctgttccccaacgaagcccaggcgcgggtggaagagatggaagcggacgaagactacagctccggcaccgtgcgctttctgcgcggcgcggtaaaagcctgccgcagcggcgtgcgccgctgccacctgatcagctatcaggaaaacggtaccctgctgcaggagctgttctcacgcgacggtatcggtacccagatagtgatggagagcgccgagcagatccgccgcgccaccattaacgatatcggcggcatcctcgagctgattagcccgctggagcagcagggcattctggtcaggcgttcgcgcgaacagctggagatggaaatcgataaattcaccattattcagcgcgacaacaccaccatcgcctgcgccgcgctctatcctttcccggaagagaagatcggcgaaatggcctgcgtggcggtacatccggattaccgcagctcatcgcgcggtgaagtgctgctcgaacgcattgccgcgcaggcgaagcaaatgggcctcagcaagctgtttgttcttacgacccgcagcattcactggttccaggagcgcggatttacgccggtcgacgtcgacctgctgccggagagcaaaaaagagatgtacaactatcagcgccgctccaaggtgctgatggcagacctggcctgatcccttctccccggaaagcgcgcggccgaccggggaaaacctcactgggcggaaaagatatccgtcaggccgctgcgtcgttcggtacgcgcagccaccgcctgagtcagcacctgctcatcggcatagatcgacagctgccgtttcgcacgcgtaatggcggtataaaccagctcgcgggttaccagcggcacgctgcgcgaaggcaggatcagcgccgcgtgatcgaactccgacccctgcgatttatgcaccgtcatcgcccaggcggtatcgtgctccggcagacgacttggctgtaccgacttgatgctgccgtcgggcatcgagaaccagacgcgcaggccatcgcctctttccagcgcgatgccgatatcgccgttaaacagccccagcgcgctgtcgttgcgggatatcatcaccggccgtccttcataccagcgcgaatgccgcggtaacgcgatcgcccgcttgcggttcagcatctgctccagctgttcgttcacgccgctgaccccatacggaccctcgcgcagcgcgcacagcagctggaattcgccaaaggcggcgatcatctcttcgggctcagcccgcgcgcgcagcagctgcaggaagcggccgtagcccgcctgcgcctgattcagcatcgcttcatactcttcggtggcgctcagcggatacagggcgatatcgtcgaacgactgacgcagcgttgcgcgtaccgcgctgcgctcgccgctgttcaccgcccacgccagatggccgatcccggaatggcgaccaaaacggtagcttttttgcagcaggcacaggctgtcgcgcagcgcaccggcaacgttgccctcgcccgccggcaccggctggccggtcaaccgggcgagctgtgccgcccgcgccggggtatagcctgcattaacccaggcgcaaatatcccccagcaccgctccggcctctaccgacgccagctgatcgcggtcgccaaggaaaatcacccttccgtgctcaggcagcgcgtcgatcaggcgcgacatcatcggcaggtcaatcatagaggcttcatccaccaccagcacgtcaagatgcagcgggttgccggcgtgatagcgcatccgctggctgccgggctgcgcgcccagcaggcgatggagggtgctggcttcggtgggcaccagcgccttttgttggtcgctgagagggaggcagcgcagcgcagcgccgagggactcggtcaggcgcgccgcggctttaccggtcggcgccgccaggcgaatccggcagcgcgggctggagaatgtctggatcagcgcggccagcagtttagcgacggtcgtggttttaccggtacccggaccgccggaaatcaccgaaatccgtcgggtcagggcgaccgcagccgccactttttgccagtccgtttcctcagcgggcggaaacagcgcatcgagcgtcgaagccagccgggcttcatccacctccagcacctgattggcctcattgaaaaagcgcgcgacggttaattcgttgcgccacatgcggttgaggtaaagccgttcgccgcagaggatcatcggcgtcgggcgctcaccgccgctgaccgcctcagcatcgttaagcagcggcagccagccgtccggggcgccggtcagctcaaggatctgctcactcaggcctgccgcttttgcgctcagcagctcatcctcggcgagacgcgaaatcggcaggcagacgtggccttcaccggcatcgcggctgagaatggcggcggtgagcttcaccgccggatgcgcctcctgcgccaccatgagcgcaaactggacgtccagcgggcgcagcaggcgctgttcaaccgcctgcagtaacagttcatccatggtcatagcacaacctcctgggtttccccggcaaacagcgcatcgaggccgttaatcagcggcagcgccggccgggtggtgaagataccctgcccgccgtcctgcccgtccatgccgcgtaaaaagagataaataacgccgccgaagtggcgttcgtaatcataatcggcaatgcggtggcgtaaatatcggtgcagcgccaggctatagagctggtactgcaaatcgtaacggtgcgaacgcattgcctgccgcatcgcgtcctgggtataagcctcgcgattttcccccagccagttggatttgtaatccagcaggtaatagcggccgttgtggcgaaacaccaggtcgataaagcctttcagcatcccacgcacctggcggaaatcgagcgttggggtatccacggagagcggatcgtactgacgaatcagcgcatccagacgcaggggatccagcggctgttcgatgggcagataaaacgccatctccacctgtttatcgccttcgctcagctgattaagggcaatccccgcgccgggcagaggggtacgcagcacgccgtcgagccatgcggtcagtaccggggtccacttttcctcgaagccgctcagctggagcctggccgccatccagtcggcgggaaccggctgggtaaaatcgagatcttcgaacaaactgtgcagaaacgtccccggcgacgcgccgcgcgggaactggtgcggagtaagctgcggctcttccgcaacctcaccgacgccggcggcatcgacatccagacgcggcagaagatcctgcgccgcgctgtgtccattctgctgcaggccggagtagctggtgacccgccagtcatcggtcaccgaacgcgcgagcaaacgggctgaaagcggcggtagcgccgcctgcggagcctgccacggcgttggcgcagccgtatccgggagctgcagggcgatctccccgctgcagaacgcctgcagacgggccatcagccctgcggcatccatcgcttccccgccctgcagcaggcggcccagcgcgctgtggtgaaaatcgctggcgccgggcttgtcgctgcgccgggtgctgagcggcgcaacgccaaggctgcagtgccagaccgcacgggtcagcgcgacgtaaagcaggcgcagatcttcggccaggcgttcggcctccgccagctccatgctgccctccgcctgccccaggtcgagaacggcggcaaaggaggttctgtcgtgataaaacgcctgatcctgtttacggaaacgcgcaataaacggcagccagaccagcggatactccagccctttcgatttatggatggtgacgatctgcaccaggtgcttatcgctctccaggcgcatctgctggctggaggcgttgctatccggctcggcgatatgctgcgccagccagcgcaccagcgcatgttcgctctccagctggttcgccgcctcctgtagcagctcgctgatatgcaggatatcggtcaggcgccgctcgccgccgctggtcgccagcaggttttcggcaatacgccgcgcggtcatcagcgcccgcagcatcggcatcacgccgcgctgccgccagacttgccggtagccgctaaactcttctaccagctcatcccaggcccgttcgctctggttgaggttttcaatgtcctgcgcgttgaggccgaacattgcggtcgccagcgcgctgcgcagggtattttcccgctcgggggccagcaccgcctgcagcacccacagcagctcctgcgcctcgggggtttcaaacacgctatcgcgattggagagataaacggagggaatcgacagcagctgaagggcatcgcgaattaacgacgcctcctgacgattgcgcaccagcaccgtgatgtccgaagcccgcacgggttcagctttttcaccgcgccacagcagcgccttgccctgctggcccgcgctgagccagtcgcgaatttgtgccgcgcacagctgggccataaacgcctggtaatcccccgccccgacggcctcgcccgacatcagccagatattcatcgccggtaccgcagcatcatcgacggtaaagcgcagcccctggtttttatcggccgacttcaccggcataaacgggatttcgcggaacataaaggggttatcgctgaggctaaacaggcgattgacgctatcaaccatccccggcgcggagcgccagttggtatcgagcgtatagtgggcggtgacgtccccacgcgctttcatgtaggtaaagatatccgcgccgcggaaggcgtaaatggcctgcttgggatcaccaatcagcagcagcgcggtgtctgcctggcgccgccagatgcggcgaaagattcggtactgctgggggtcggtatcctgaaattcgtcgatcatcgctaccggaaagcgctggcgaatcgcgctggccagcgcttcgccgctctccccgcgcagggcgtcatccaggcggctaagcatatcgtcaaagcccagctcgccgcggcggcgtttctcccgcgcgaccgcttcgcggatttcaaccatcgccctggcaatcaccaggtcggtcaaggttaacggtgtcgccagcagcgcttctaccgcgctgaacagcgggtgtaccggcggcgcgccgtctgctttggtgcgctcaagcaagaaggcctgggagaacttctccagcgcatccggaagctggtagctcagggtctcttcctgggcccaggcggtcactttctccagccatttcccctgattgccgcgattaaacttgcgccggtcgaggcccgagttttccagcaccgcctcaacctcgcccacctgtgccagccactgctgcttcagcgcgttgatgcgttcgataatttgctgatggcgttcggccagcgtttcgtcagccggcggcggcgatttgagctgcggcgcctctccctgtagccagcggtcgatggatttcagcagatcgcgcggccctttccacgcttcgtggataaccgccgcgatgtcacgcggcagtgggtaacagtggcgacgccagaagtcggcgcaggcctgatagcgcaggcgggattcatcttcaatcagctgctgttcgaacagcatgccggattcaaaggcgttaaggctcagcatccgctggcagaagccgtgaatggtaaataccgccgcttcgtccatctgccgttcggccagcagcagcgtttgcgccgcctgggttttatcggcgatttccgccagcagcccggcgtaaagaggattgtcggtactttcgcgcaggcaggcgatacgcagctcgtggatattgctgcgaatacgcccgcgcagctcttcggtcgccgcttcggtaaaggtcactaccagcagctcttccacgctgacctggcggggaaaggcggattccccgcccagccccagcagcagccgcagatagagggcggcaatggtaaaggtttttcctgtgcccgcagaggcttctatcaggcgctcgcccgtcaggggcaagcgcagtgggtcaagagactcggcggtgtcggtcattcattctctcgcatcaggggtaaggatttctgcaatgcgctgacgttctcccagactttgccatcctgcggatgcgcgtattccgccttgccattctggctaccggaaacctgggagagaattgccatgccctgcggatccaccaccgtctgatggaagaagtcggcaagcttttgcggcgtcagcagtttaatctgagccactactttatcacgtgaatcgaagcgcatattaccgcgatcgaaatctttgctcagcttcgacgcttcatcgcccagcgtttgcggcgcttccagcatttgaccgatcaccgcctgctgaatctgcgcaaactcttccggcttcattgcccgcagtttggcttccgccgtggggaagaaggcctggaaacgctgccagaggtaagccggctgcttatcgctgctttgcagcaggaagcccatcccccactggcggccaacgttcatcgagaaggcgaagaccgcgtagcccagctgctcttccgtacgtagctggttatagaaccacggctgtacgatttgcccgaggagcgagctggcggcagaactggcgtattcgtccacgttcggcggcgcgaagacggcggccagcgcggaatcggtactgttgcccgctttttcaaaaatcgccagctgtttacgatcgaccagaacgtctttgttacggcaccactcgttgccgtcggcgcccagctgtttttgaatctgccgcgccatggcggtggattgatcggcggtaagattaccgatgaccatcagctccggtcgccctttcgccttgagattatcgcggtattccagcacctctttcagggtgatcgatggcagcagcgcccgacgctcttcgcgctggaagtacggcacctgagaaaccatctgaatcggcatgatcgcctgatcgtaggctttgcctttatccgccgaatccatcatctgggcataccaggatttagcctgctccagctgctcttcggttggcgtatagctgaagtaaccgtcgagcagggcgttaaacagctcaggcagatgctgcgtatagccgttggcgttaaccatcaggccgttattcgcgccggtagagaagctgatccccccgaccgccgcctggttgctgagctggtcgagcgcaatgcccgccagataatcattgagcgcaaacatcacctgccggcgggcgctgtccattgcctgcgggttacgcagaaccagcgaaatatccgctttcggttcgctggcgaagtactggctcggcgcgtaaatcacccgcagcgtcggttcatctacaatcagctgcggatgcgggtaagccttgtcgcttttgattaagctgaaatcatccggaataaaggggttcagcaccggcagcttgaggtcgatggcgctggacttctgctgccagtcggcaaaggtctgctcgctgatcttatccacctgatagggcgcattgacgaagtaggcggtcttgttatgcggctctttcgggctgatgtaccagatgcgggcgttttgcggcgtcatcatcgccaggcggtcttcgatcgcctgcggatcgtagcgatcggcaatgttgacaacgtccagcgtatgctcgaccggcacgcggatcatggtgtccgccagccattcgacgtaatccatattgcggttgatggacgggtagcggaagtcgagcgccagcacgtgggccagctcatcaaaatagcgcttatcgattccctggctgcgcagcagattgaggtagctgaagatggccgcggtaacttcatcgcggtgcgccagacctttgtccgtcagggtcgcggatatagccagcaccccgctgttgccgttcaccaccgggtcggagtccgcgcgaatcccttcaaccagcccctgcttttgcagccagtctgagagcgtgccgggactgcgattaccgatcatataggtcaccagctcgtcggttttgctgcggaacttgtcgctattgttatcaatgcggaactccacgcgcagcactttacgcggcatcgccggaacgtagtgaatgatgatgcccttttgcgcatcggtcaccaccgggacgttaatctccggtttgctgatatcgtggttcggcacgcgaccgtaggtggccgccgcgatgctcgccagctccggcagcggcttgttgctgtagatcaccgctttcatcaggttggcggaataccagctatcgcgaaaggcgtgcagggcatcaagcaccggtttaccgggcttgtcgctcagcgtttcaaggttaccgccggaaaactgcgagccggggtgcgccgggttaatggtttccgcgctaacctgcgccattcgcatcccgtcccgggtacgcgccatcgtgagctcggcgttaaccgcattacgctcgcggtcggcatattttttatccagcagcggcgcggcgatggcgtcggccaggcgatcgaccgcgccgtccagggcatcgttttccacttcaagatagaaggcggtgcggtacggcgcggtgctggcgttgtggctgccgccgtgcattttgagatactcggcgaggctgtcaggctggggatactttttcgagcccatcagcgtcatatgctccaggaagtgggccagcccctgatgctcggcgggatcctgcagcgatcccacgggaacgaccagcgccgacagcgattttaccgcctggggatcggaaaccagcagcactaccatgccgttatcgaggcggatcgcctgatattgacgggtatctttttcgcttttacggatggtttcctggatcggttgccatccggtgtctgcctgacttaacggcgcccaaagggcggccagtaaaacaataaccttgaaccataaactgcggggcattcacggacctcatcattaacaaacctggcgctgcataattggcagcctttataaacatcagtccgtgattcgttgcgcatcataaatgaactgccatccagtgcgcaatttttatactattacaatgttattcggactgatggaaacgaaacaccggtagcaaataacgctgcgtttgcgtcaggatctcttcatagtattccgcttccagcgtgcgccacaggcgctgataccagacgtcggcaccttcgccgctgaccaccatgttcccttcataagcctgaagaaatttactgcgcgctttttgctgcgtctcttcgtccattaacatgacatccttttcggcgtcataacagacttttagccatgcgccgccgctttccggcagcagcagcagcggtttggacattccctgcaggtaaccgtcaaccagatcgttgaggtagacctgggcctgctcctgcgccagcggtggaaaacgccactcgccctctttgcgcacaaacagccgactttcgccggtaccgccactagcacaatagacaagatgctccagccaaagttgcatcccctgcgccacgcttaatagcgaaggccgccagcgcagcaaaccgtcggattgtacctgctgcagccagccggtgatgttgactccgttgcattgcagatcgatttccatgctctgccccggctggcggcaggcgatcacccgttcggccagattttgcatctcctgacgctgggtctcccaggccagttcgccgaacgcgccatagggtagctccccggcggcacggaagcggcgatacattgccgaggcgtcctgctgctcaatcagcgtattgagcagctgctggttcagctgatagcggctcagcccttcgagggtaaaaggttcatcgtcggggatctcgctctcctccgagcggaaattcacccgcagccgctgctgaaagaacgcgcgaacaggatgctgccagaagcgcagcagctgttcgaacggtaagtgatcgatgtccggtaccggtagcggctggatgaacgcgccgtgcgcttccccctgctggctggcggccgccagccattcccgggcatagctttgatcttcattagccagaaaattggcggcatcgaaaggcatgcgggtatgcagatgcgtgatgtgctctttgacccgccgttcgctggcatcgcagtccagctcttcgtccccttccagacagtggctctggccgatgtagtccgccagctcctgaaccagaacggagggatagcgctcgctattgtcctgaatggaacggccgatatagctgatatagagcttctgctcggccgacatcagggcttcaaggaacagatagcggtcgtcgtcgcgacggctacggtctccgcgctgcggcttctggctcattaaatcgaagcccagcggcgccagggtgcgcggataaacgccgtcgttcatccccagcaggcagaccaccttgaaaggaattgaacgcatcggcatcagggtacaaatgttaaccgggccggcgagaaagcgctggctgatgcgctgctgatcgagcctctgggacagctcatcgcgcagcaaagagagcggtaccgtttcgccatactgcgcgtcgactccgccgtcaatcaccgcctgccactgctgttctatcagcgccagggcggcttccgtttcgctgtccggaaggaagaagtcgttcagcaggtcgcggcataccggcagccactcggctaatgggcgatcctgggccagcccgcggcgccagagattaagctgcatcagcagcgatgccaggttgcccaccagctcggcgataagcccgctcgactcatcataaggcagcaccgagcgccactccccttcgctgctgtccatggcgtagcccaacagcatacgcgtcaggccaaagcgccaggtatgctggccggtagccgggagatcgagttcacgcacgttgtcgtcatccattccccagcgtacgccggattcgttaacccactggcgcaggtagcgtagcccctcttcgttaatgttaaagcgcgcggccagcaccggcacatccagcagcgccagcacgtcttcgctggcaaagcggctgtcgggcagcgaaagcagggtgataaacgcctgcagcgccggatgcgattcgcgggcccgccggtcggatatcgcccacggcagccagcgctcgccgctggcgctgccgaagaccgcctgaatataggggctgtagctatcgatatccgccaccatgacgataatatcgcgcggcgtgagctcgggattctcttcgagcatcgccagcagccggtcgtgcagcacctcaacctcgcgctgcgggctatggcagacatgaatcgtcaggctgcggtcgtccgccgccagcagccgcttgctgcggctgttggcaaactcctcggcgctgcgcccggccaccgccgcattacgcagttcgagaatatccgcctgaagattatgcaacaggttatccggcgcgatatcgacaaaggcgtccagctcttcatagcgctcaagacccgccagcaggtagatatagtcgcgccccagcttgccccaggaggccagcagcggattgccgacatcctgttccccggcatcgttgaataaccccggagcctgttgcgtatcgcgaaacagaggcagctctcgcgtcgtttcgcggtggtggcggcgctggcgggagagcagctttgccagaaatgccggatctttaatgtcgccccagtagtagcggcacgggttagtgaagagaacatatacatcgacatgcttacccagcgcctggagcgcctgcaggtataccggcggcagcgccgaaatcccgcagataaacacccgcgacggtagcccggcgggcggctgttcggcggcctcaagcgcgctgataaagcgttggtataaattggcgcgatgccacagcggctggcccagctcagcggtatattccaccagcgctttccacagcggcgcctgccactcctgcgcgtctccaagcccgtcaacgcgctggtcggcctcccagcgcatcagccactcggggcgataaaccagatactggtcatagagatccgccactctggcggccagctgaaacagcttgcgcttgtcgctatcgtcgtgcagatagtggcgcagtagcgtaaaggcttcatcgttcagccgctgcggtagcagggtcatgagtttccagctcatactttgcttgctgaacgcgctttctccgggaatatcttttaacacccgcacgaacatgtcccagataaaactggcgggtagcgggaactcaatgttggccgcaatcccgaagcgctgcgccagcgtcatctgcagccactgcgccatcccggtactctgtaccagcaccatttccggcataaaagggtcatccagccgctggcgctcgacgataaactccatcaaggcttcaagcacatccagacggtttgagtggtacacccttaacatattcgctcctggctactgactgaccgggcagtgcagccgggtcatctgcgcccgcctggctgcgggcatcgtgatcgttaccgtgatgctgacacatctttgcaccgatgtctgcatgcgggatacctggcgattcgcgggaatcaccggtgggctaagctgactgaatcgccacgcatcgcgccacagctgacggtactggttgagctgcataaagccgttggccagcccacgctgatagcccgccagcgcggtcacggttgcgataagcaagactaaagccagcagcgtttcgggcaggctaaaccctctctgccgcctcagggcatctggcataggcttgcctcctttaacgggcaaaaatcgctccagccgtgaggcgaaaagcggacgcggttttgttcgattacgcctgactgccacagcagtatgccgccgccatcgctgccgccaatcagcaataccgaggcgtcgctaaagactcgcaggcaggcgcgccagccgagcgccgcgttctgctggcagctaaccgtttcctgaagcggccagacgagcccctttccccactgcagcgcggaatgcgcatcagcggcatcgccaagcgcccgcgtttcgctggccgtctgcgctaacagcgaacgctgctgctggtgcagcccctggagtaatagcgtgccgagcgctaacagcagcagcaccatcagcagcgaagagagcccgcgctggcgattcacaggttatatcccgttacgccgtattccgcccgcgcgcggatttgcgggtcggcgaccgagtgcgccgcaagggtaatcgataattcaggcgcgaagcccgccctctccaggcgcgtaacctgaaacgcggtgacctgaatcgccgccgggttggtcattttctcccagcctttgccactgcaggcgcttgcgccgcgcagggtttccagcgcgccatcgcgcaggcgaaacccggtggtatccgattccgatgacggcgcgctattccagacgccatcgctgttgctatcccagctcaccagcaggcaatcaccgccctctgcgatatacagcgcctgcccgtaacagcggccgcggcagtatccggcgcgctgcagatgcttcgcgacggtgtagattcgctgccagagctcattttccagcgactgctgccgggtctggcgaagcgcggcccactgcagcgccggaagaaaacgcgcgctgccgagcagcagcacggagctgatggccatcgcgatcagcgtttccggcagggaaaagccgcgctgttttacagacacgatgccgtctcctcgccgcgacacaggcggatacgcccccaatgagaaacgataatgttccagccgcccgccgcgctttgcaagcggatatgcccggcccaggcagtattacgcaggccataaaaccccagccccggcgtcatcgcgctgagcgagacctccggccatagcggttgcagcgtgaaagcgtccctgaggcgacagtcggccatcggcccgctggcgctcaggcaccagccctccgcgctttggccgacgcttaataccctgtcgcggttgtgccagttggcgtcatcgcgtagcagcaccaggtagtcgcggacctggcaggcggtttgccacaggcgctgctgccgttgccagctctgccagccgtacagcccgctggcgccgagaatgacgaccacgaccatggtgagcagggtttcaatcagggtatagccatgttctctgttcatgggccgagtatgcggaacattgaggctttattcgaacggtaaaatgcgggtttgcggcgcgcgccggagagtattaaaggcgttgcagcgggtttcaacagtgcaggaaatctgctcgcaaaaaagcgttccgtcgggggaataaagctggccgtcggcccggctgaggcataaaaaaaccggcgctcgcaggcgccggtttttcgtcgtcacttccggattaaatcgccaccggcgctttaatccccggatgcgggtcgtagccttcgatttcgaagtcttcaaaacggtagtcgaaaatcgatgccggcttacgtttgatcaccagcttcggcagcgcccgcggttcgcggctcagctgcagatgcgtctgctccatgtggttgctgtacaggtgcgtatcgccgccggtccagacaaaatctcccacttcgaggtcgcactgctgcgccaccatatgcaccagcagcgcgtagctggcaatattgaacggcaggccgaggaatacgtcgcacgagcgctgatagagctggcaggagagcttgccgtcggcgacgtagaactggaagaacgcgtggcacggggccagcgccattttgttcagctcgccgacgttccatgccgagacgataatccggcgagaatccgggtcgtttttcagctgttccatcaccgtgctgatctggtcgatatgacggccgtccggcgcgggccaggagcgccactgcttgccgtaaaccggccccagatcgccgttttcatccgcccattcgtcccagatagtgacgttgttttcgtgcagatacgccacgttggtgtcaccctgcaggaaccacagcagttcatggatgatggagcgtaaatgacagcgcttggtcgtcaccaacgggaatccttcctgcaggttaaaacgcatctggtgaccgaagatggagacggtaccggtaccggtgcggtcatttttttgcgtgccctcatcgagcactttctgcatcaaatcaagatactgtttcatggttcctcaagaattttgttgctgcggacgacaacggtacgcccagaccatcatgatgatacccgcaagcaccatcggaatcgaaagaatctgccccatgctgatgtactgtacccagccgccggtaaactgggcatcgggctgacggaagaactccacgatgatgcggaacagaccgtagccaatgaggaacaggccggaaacggaaccggccggacgcggcttgcggataaacaggttcaggatcaggaacagcacgacgccttccagcgccagctcatagagctgagaagcatgacgcggcagcgcgccgtaggtatcgaacagcgattgccactcaggatgcgacggcagcagcgccaggtcttccgcccgagagccggggaaaatcatggtgtagtggaagttcggatcgacgcggccccacagttcgccgttgataaagttgcccagacgcccggcgccgaggccaaacggaatcagcggcgcaatgaagtcggaaacctggaagaaggtacgcttcgtgcgtttggcgaaaatgatcatcaccagaatcacgccgatcaggccgccgtggaaggacataccgccgtcccagacgcggaacagatagagcggatcgtcgaggaacaccggcaggttgtagaagaagacatagccaagacgcccgccgaggaaaaccccgaggaagccggcgtacagcaggttttcaacttcgttttttgtccaaccgctgcccggacgattggcccgacgggtggccaaccacatcgcaaaaacaaacccaaccaggtacatcagaccgtaccagtggagggagaccggtccaatggaaaaaattaccggatcaaactccggaaaatgcaggtagccactattcatctgtcaccataaacacttgttattccgccgaaagtggacagcggggatcgttcgcgcgcgtcagaaacgggcgctccaaaggctgcgaatgatagcataagcgcgaagggcgatccgcgccggacatgtaaaagatatgtatacgaatgcgaattcgcggctgagcattcccggaggcggcgcgctgcgcctgtccgggctacccaaccctcaggccgcccgaacctcgtcagcgttgtcccggatcacggctaacgccttacccgggctacaaattcatgaaccgtagcccgcgctagcggccgccgcgaatcaggccgccgagtccgcgtcgctccataaaagccgcgacctgatggcgcacttcggcggtcatctgcgcttccaggctacgctgggaaagctcctgggcttcattgatatcgatgcgccgcagcaaatacttcactctcgccaccgaacgaccgttcatcgacagatgacgatagcccataccaatcaggatcgtcacgcacatcggatcgcccgccatttcgccacacaggcgcaggtcgataccaaaacgctcggcgtcgcgggcaatcatcgccagcgcccgcagtacccccggatgcaggctgtcatacatactggcgacccgggtgttgttgcgatccaccgccagaatgtactgggtcagatcgttggtgccaacggagataaaatcaacgcggttcgccagctgcggcagcataaagaccatcgacggcacttccagcatcacgccaagacgcgggcggggaatggcgtagccgatcatctcttccacttcgcggctggcgcgatcgatcaggcgacgagcctcatccacttcatccaggctggtgaccatcggtagcaggatgctgaggtttccggttgccgcgttggcccgcagcatcgcgcggacctgtaccagaaagatctccggctgatcgagcgtgatccgaataccgcgccagccaaggcacggattctcttcgctgatcggcatatacggcagctgtttatccgcgccgatgtccagcgtgcgcagcgtcaccgatttctcgttgaacatctgcagcatgccctgatactgggcaacctgctcctcttcggaagggaagccgctttgcagcataaaggggatttcggtacggtaaaggccaataccgtcgacgaaattgccgagtttttcttcatgctcggggctcaggcccgcgttgagcatgacttttacccgctcgccgcttttcagttcggaagcgcgttcaagatcgtcctcggccaggcggctaagctcgttctcttcgctgatcaggcgctgatactcttgcagcagcaccggctcgggatccaccagcagctcgccgcgatagccatcgacaatcagcgtatggccgtgcagcagcgaaggctgaatatccgcccccatcaccgtcggaatgcccagcgcgcgcaccataatcgcggcgtgggagttcgccgcgccatcgcgcaccaccacgccggctaaacgatcctgaggaacctccgccaaggtggtggccgacagttcatccgccaccagcacgatgcgctccggccaggtattgggcccctggatactgtcatcgagatggaaaagcagccgctggcccagcgtgcgcagatcgcccgcgcgctctttcagatagccgtcgctgagcgcggcaaactgttcggcaaatttctcgatgatcttcttcaccgcccattcggccaccgcgcctttatccacttcagcgaacagctcgcggcgcaggcgcgcgtcggaaagcaggtgcgaatagaggtcaaagatggccgccgtctctttctgcgcgccggcagcgtagcgtttgctgtagcggcgaaactcattcgccgcctcttccagcgcgccggtcagccgctcgcgctcggaagcggtatcgagcgtcgaggcttcataaacctgctccatcaacggcaggctgacgtccatccagccttcggcaatcgccacgcctgacgaggcgggcagcgcgcggatgcgggtctgacgatattgaccaaacagcgcgtttagctgggattgagagagaatgccggcgatttgcgtggccagggtgaccaggaaggactcttcgctttcgtcaaactggcgcagttcgcgctgctgcacaaccagcacgccgagcagctgacgccgctggataatcggcacgccgaggaaggcgcgaaagcggccctctttgaccgcgggaatatatttaaagctggggtgcttttgcgcgtcggcgaggttaatgggttcggccaggcggccaaccaggcccaccaggccttcgtcaaaagcgagcgcaacgatgcgcccgcgcggctttttcaacccgcgcgtcgccatcaggtaataacagcgtcggtcattgtcagccagataaaccgaacagacttccgtctccatcgcggcgcagatatcggtgaccaggatatccagcgcctcgtttaaacgcggcgcactcgcgaccttctcgactatttctcgcaaccgagtgagcataatgtgcgtggcttaacctcttttacgtcgatatgcaggcgcgctctgcggcttaggcgtgctttccgccagcgccatggtgacgctggcaaactctttcatcaccctgcggtatacgtcgcgcttaaacgacaccacctgacgcaccgggtaccagtagcttacccatcgccagccatcaaactcaggtgtactgctggtttgcatattgacatccgcatcgctgccgatcaattgcaggagaaaccacttctgtttctggccgatacataccggctttgtgtcccaacgcaccaaacgtttaggcaatttgtaacgcaaccagttacgggttgaagcaaggatccgcacatctttacggcttagcccaacttcttcgaacaattcccgatacatcgcctgctctgctgattcccctggatttatgcccccttgcgggaactgccacgagtgctgaccatagcgcctggcccacataacctggccctggcgattacagattacaataccgacatttgggcggtagccatcgtcatcaatcaccggactacctcaaaataagcttcaatgtgaatgattgtttcacactcgttggaaacggtaaaccactctgtgagggggatgagatcgaataacatttgaataactcacagtaatacccggagttataaacagcgaaagccatacccggacgattttattcactttttctgtggatagagttgtgaagaagtacggaattaaccagggaaaacccggaatcatccgaacagcgtagcgatagcacctgattataatgacctaattttcataaagttagcatgttaaaatttcataattcacagtataacgtgacgatcatcacataagagatcctggaactgatgaaagatcgagcaatgttggttttatccacagattacgcatgtgctctgggcatattttgtctaaaaactcgattttcatctcacgtcaaggctgtaaatggaaacagtagtggggcttttccccagttatcccatttttctgtggataacagggtgtaagatcctgttcattgtcggtgaccagttctggaaaacccggtttcaccattttcacagcggcaaaaaatcgcaaaaaaaaccatatgaatcatcaaattgtcatacttactcaagaaaaggtaaactctatccacaacggatgaaattactgctcactttttagtcagaggttttacgctatgccgaccatcgcgccgctcttatcccccccgcaaagccaggagcagcttctggcccaggcgcagcagctggcaggctattcgctgggggagctggcccagcttgccgggattccgattccgcgcgatttaaagcgtgataaaggctggatcggcatcctgctggagatatggcttggcgccagcgcaggcagcaagccggagcaggatttcgccgccctcggcgtcgagctgaaaaccatccccatcgattcatcaggtcgcccgctggaaaccaccttcgtctgcgtcgcgccgctgaccggcaacagcggcgtcacctgggagagcagccacgtgcgtcataagctcaagcgggtactgtgggtaccggtagagggcgatcgcgcgattcctttggccgaacgccgcgtcggcgcaccgctgctgtggagccccagcgaagaagaagatcgccagctgcgtatggattgggaagagctgatggatttgatcgtcctcggccaggtcgagcgcatcaccgcccgccacggcgaagtgctgcagctgcgcccgaaagcggcaaacagcaaagcactaaccgaggcggtaggcgcccgcggcgaaccgatcctcaccctaccgcgcggtttctatctgaagaaaaactttaccgccgccctgctcgcccgccatttccttctctcctcgaaataacggcctggagatgattaattttttgttctgccgtggcggttgcatataatcgcatctttctattttgcaggactttgaacgatgttatttgcatgggtaaccgatcctaacgcctggctggcgcttggtacgctgacgctgctggagatagtgctcgggatcgataatattattttcctctctctggtggtggcaaaactgcccacagcgcaacgggcccacgcccgccgtattgggctgatgggggcgatgatcatgcgtctggcgctgctggcgtcaatcgcgtgggtcgtcaagctcactaatcctctctttaccgtgctaggccaggagatctcgtttcgcgatctgatcctcctgctgggcgggctgttcctgatctggaaggcgagtaaagaaattcacgaatccattgaaggcgaagaagaagggctgaaaaccaacgtccattcatttatgggcgccatcgtgcagattatgctgctggatattattttcagcctcgattcggtgatcaccgccgtcgggctgtcggaccatctgtttattatgatggcggcagtggttatcgcggtgctggtgatgatggttgccgcccgttcgataggcgattttgttgaccgccatccttcggtgaaaatgctggcgctgtcgtttttgatcctcgtcggctttacgctgatgctcgaaagtttcgacgtgcatgtgccgaaaggctacatctatttcgcgatgttcttttcgattgcggttgaaagtctcaacctgctgcgcaataaaaaaaatccgctgtagcccgctaaaatgcagccctgaaacgggctgcaattcttttttaagacttaactgctttttatgtctcacaaatcaggctattaatatactggtacgaggtgcggctataataggggtgatagcgatgaaaaaatgggcagtattgatttccgccgtaggactggcgttctcggtttccggttgcagcagcgattacgtcatggcaaccaaagatggtcgcatgattctgactgacggcaaacccgccatagacgacgacaccggccttatcagctacgaagatcagcagggtaataaaatgcagatcaatcgtgacgacgtttcgcagattattaaacgttaagtcccgccgtcaggtcgcgatttagcgttttatcgcaccgttgagcagcgttctttattcttcagcattcagagaaaagtcgggataaacctgatctgtccgcgaggattcatcaggccggattccgtcagcccggcttttttgatttttttacttcccctttttctccccctctgccatttttatattcctttgtcggggaacgcctgaccttgttgataaaaaaggaagccggctatgcagtatcaccgtatcccacacagttctcttgaaatcagcacgctggggctgggcacaatgacgtttggtgagcagaatagcgaggcagacgcgcacgagcagctcgattacgcggtgagtcagggcattaacctgattgacgtcgcggaaatgtatcccgtcccgccgcgcccggaaacccagggcctgacggaaacctacgtcggtaactggctggcgaagcgcggcaatcgcgaaaagctgattatcgcctctaaagtgagcggccctgcccgcaataacgacagcagcattcgtcctgaccacaagctggatcgtaaaaatatccgcgaggcgctgcacgacagcctgaagcgcctgcagaccgattatctcgacctctatcaggtacactggccgcagcgcccgaccaactgtttcggcaagctgggctacacgtgggccgattccgccccggtcgtcaccctgctggatacgctggacgcgctggccgaattccagcgcgccggcaagattcgctatatcggggtctctaacgaaacggcgtttggcgtgatgcgctatcttcatctggcggacaagcacgacctgccgcgcatcgtgacgatccagaacccgtacagcctggtgaaccgcagctttgaagtgggcctggcggaagtcagccagtatgaaggcgtggagctgctggcctattcctgcctggcgttcggcacgctgaccgggaaatacctcaacggcgcaaaaccggcaggcgcgcgcaatacgctgttcagccgttttacgcgctacagcggcgagcagacgcaaaaagcggtggcggcctatgtcgatatcgcgaagcggcacaaccttgacccggcgcagatggcgctggccttcgtacgtcgtcagccgtttgtcgccagcaccctgctgggcgcgaccaccatggagcagctgaaaaccaacgtcgaaagcctgcatctggagctgagcgcagaggttttagccgagattgaagcggtgcatcaggtttatacctacccggcaccgtaaggccgtaaaagcccccggaggcgatgctacgcatctgtccgggctacaagttcgtgcagtttgtagcccggacaggcgcgacgcgccgcctccgggagattatttacgccgtccccaaatccacagggcagtaatcgccagggcgaacaccacgccaaagccaatccctacgccgacgacaggaataccgatgctcaccgccagcgaatagaggcccagcatcagcagcatcgccacgttttcgccgaggttctgcaccgcgatagcgttgcccgcgccgaccgtatgtttccctcgctcctgcagcagggcgttaagcggcacgataaagaagccgccgaacgcgccgagcagcagcagcagggcaaacgccggcagcagcgcctgctggatggcgaaaaagatgaccgccacgccaatcaatatcccggcgggcatgcagcgcgacaccgtttccagcgtcaccagcttcgccgccgcgccggctcccagcacaatccccaccgccaccatcgcgttaaggtaggtcggcatggcgttgctggtaatgcccagcgccgccggcacccacagcaccagcaggaagcgcagcgtcacgcccgccccccagaacaggctggtgccgactaacgaaaagcgggtctcaccgttgcgccatagcgtcgtacaggcgctaaagaagctgtgggtcatcggcctgaagcgccacgactgcccgggacgcgccgccggcagcttcgggatccacaggttggcaaccaccgcgccggcgtacaccaccgcgcagacgccgagcgccgccatgatatgccagtccgccaggataccgcccgccatcgagccgagcaggatcgctgcaatggtcgaggactccatcaggccgttcgctttcactaacttatcgccggtggtcagctcgccgagaatgccgtatttagccggagaataggcggcagcgccgatgcccaccagcgtatagccaataaacggattcacgccaaagcagatgcaccccgcgccgatcagcttcaggccgttcgccaccatcatcactcgccctttggcaaagctatcggcaaactgtccgacaaacggcgcgaagagaatgtaagcgcccacaaacaacatctgtaataccggttgactccactccgggtagaacagctgcttcatcagcgccagggtggcgaacaacagcgcgttatcgccaaacgccgaaagaaactgggcgcagataaccgccatcatccctttcgaatacagcgacgtgttagtgtgtactgactcactcatccgaaccttccgcctgttcaaccatgcctttaagggtgacaaagtccggcttgccgctgcccagtaccgggagctgcttcagccagcgaatgtcgcgcggtaccgccagctccggtacgccgtgttcacgggcatagcgcagcagtttttcacgattcagttcattatcggtggtaaacagcaccagcgcctcgcctttgctggcatcctgtttaatcgccgtggcgtgcattttgtccggcgaaaccgccagcgccacctgctcgaccatctccagcgacaccatctcaccggcgattttggcaaagcgcttcgcgcggccctgaatccgcacatagccctgttcgtcaaagctgacgatatccccggtgtcataccagccggcttcgactacgccgtgctgattttccgccgcgggcgcttccagcacgccgggattttccacccgcagatagccgttcatgatgttcggccctttaagctgtaaacggcccccctcttcaataccgggcatggccagcagacgcgcgtccatccccggcaaaatgcggccaacggtgcccactttcgccgccatcggcacgttgatcgataccaccggcgcgcattcggtgacgccgtagccttcaagaatgcgcaggccaaacttgtcctgccagatctgctttgtgctttcctgcagcttctccgccccggcgacaacgtaacgcaggcgataaaaatcatacggattcgcaaagcgggcgtagttgccaaggaaggtggaggtgccgaacagcacggtacagttgcggtcatataccagctccggcaccacgcggtagtgcagcgggctgggatagagaaagacctccgcgccggtaaacagcggcgtcagcaggccgaccgtcaggccaaaggagtgaaatagcggcagcgccgacataaagcggtcgttggcggtaaagtcggcaatggttttaatctgctcgacgttggccaacaggcttttatggctatgcacgacccctttcggattaccttccgagccggaggtaaacagaatcatcgccgcgtcttccggctgctgcgtaacctgagccagcttcggcatcagcagatggccaaaaatccacagcttatcggcggcggtaacctcgccttttaaatcttcgagaaatacccagcgtacctgcgtcaactgctccggcaggtgccagagcttgcctttatcgaggaaggtgcgggaggtaaagatggttttgatttccgccgcggtaatggcgctgctcaggcctttgaccccggcggtatagttcatcatcgccgggattcgtccgcgggcaatcgcgccaaaaatcaccgccgcgcttattccggcgttcggcagcatcaggccgattttttcgccctgggcgctgtatttttccagaatgcgcgccacgaagagggttttggtcagcagcttacggtaggtgtccggctgaaaattgatatcttccacgcagcatttgcgcgcgccgaagcggtcctgggccgccagcagcgactcatacagcgtttcgcgcgggcgcaccgccatccgcgcctccatcatgatctgatgcagcatttcaccggcaattttacgccggtcgcgggcgcgcggcgcatcgggcatcggcagatgcgtcggcggcagcagatgcagctgaatgcgcgggaacaggcggcgcttgaccagccccttcaggcggctaaagtgggttagttcagcgccttcgattctcagcggcacgatggtcgcctgcgacttcgccgccacaaaggcggcgccgtcgtaaattttcatcagcgaaccgctcaccgagatccgcccttccgggaaaatcaccaccggacgcccctgctcaatcaggcggaccagatgttttatcgacatcggtttggtcgggtccagcggcacaaaatcaataatcggctttagcgcgcgcataaaccagcgatcgctgattgaggaatagaccgcaaacaccgggcgcaccggcaggaaaagcgccagcagtacgccgtcaataaaggagacatggtttggcgtaatcagcaccttgtgctggtgcagcgcctgggggtcaccggttaacttgacccggtacaatcctttgaaaagtagtctgaaaaatcccaaaagcataacaactccgtttgaccggttaatcagtcaaagcaggttacatgagaagggacggaaaatgcaccaggaggagcggaattcaggacaaaaaaaacctgcgcatccgcgcaggtcggtgcaagataatcagtacgaaaagcgtacttaaaaaactcaccaatcaatacctctgggatcctgattgtctcgtttttcccgccgccggcgccagccataaaacgcaagggaatgagcctaagtgcaaccagttattacttttttcgtgaactgtaacaacggctaacggcgggcaaaaaaaaacctgcgcatctgcgcaggctggtgtaattaagtggtcaacctgaagttgactccacctatcaatacctctgggatagccagagtatcaatgcaatgaatgggtaaaccagcgaacattcgcaacagccaatcgcaaagtgtaagcaaaggtgtgaattgtccgttcccggaatcattctccgctcccctgtgggtaactatttcacccgcaacgctaatctgcgtcacaattgcattaacccaaaagtaccaacccttgaatctgccgcgctttcccgtaacataaatgccatgtaaacgcttaccctaaaaaaggcctggtatggcgactattaaggatgtagcccggctcgcaggagtctccgtcgctaccgtctcccgcgttattaacaattcaccgaaagccagcgaagcctcgcgccagtcggtgggcgccgcgatggaaacgctaaattatcaccccaacgccaacgcccgcgcgctggcgcagcagtcaacggaaaccgtcggcctggtggtgggcgatgtctccgaccccttcttcggcgcgatggtgaaagccgtcgagcaggtcgcctacaataccggcaattttttgctgatcggtaacggctatcacaacctccataaagagcgccaggcgattgaacagctgattcgccaccgctgcgcggcgctggtggtccacgccaaaatgatccccgatgacgaactggcctcgctgatgcagcaaatccccggcatggtgctgatcaaccgcatcctgcccggcttcgagcagcgctgcgtggcgctggatgaccgctacggcgcatggctcgcgacccgccacctgattcagcaggggcacacccgcatcggctacctctgctctaatcacgctatttccgatgctgaagaccggctgcagggctactgggcagcgttaaaagagagcgatctgccgtgcaacgatcgcctggtgacctttgccgagcccgatgagagcggcggagaacaggcgataaccgagctgctgggccgcggcaggaacttcagcgccgttgcctgctataacgactcgatggccgccggcgcgatgggcgtattaaacgataacgggattgatgtgccgcgtgagatttcgctgattggctttgatgacgtgctgatttcgcgctacgtgcgcccgcgtctgaccaccgtacgctatccgattgtcaccatggcgacgcaggccgcggagctggcgttagcgctggcggagcatcgcccgacgccggagattacccaccttttcagccccacgctggtccgccgtcactcggtgattgcgcccctcgacagcgataaatcgtagcggtataaactgacggcgctggccggataatccaggccttcgccgatatactgccagccaaaacgctcataaaaatcgcggcaggcggagtagagaaatagctcggtatagccctgcgctctggcatatccgatgacgtgctgctgtagttttcccgccagtccctgcccgcgcgcctcaggcgccacgtagagcgccgccatccacggatagagatcctgacggctgattaaatcgcagcgccacaggccgacggtgcccagcagcctctcgccctccacggccacaaaggtaatgggcagcgctcccggcgtctggctatgttcgacaatgctggcgaagaacgcccgcggcagcgcgtcagcgccaaacgctcgccagagccactccgttacgcatgaagcgtgctgcggcgcagcgtagagggggtgaataatcataccagctttccctgaaaaatcggtaccgattcaaagagatagccgtcaaagtccggtgcgtcttcatcggagagctccagcaggctgtttttgacattttcaagatgctgccacattgcctgccaggcccccatcacatcgcgtcggcgcagggcggcgagcagcgtttgccggtccccgagccacttcagccggtacgcccggctggcgatatgcacgttgaactgctgccacagcgggctgctgtccatctgcagccagatgcgctcaaccgtcgccagcagcatctgattttgcgtcgcgccggccagcaccaggtgaaacagccgggcgttatcctggctggtatcgttggcggcaatcgcccgctgttcctgctcgataatccgcttcaggttatcgatatcggcgcgggtggccattttggcggcaaaagcggcgatattgctctccagcagctggcgggcctgcaggatctcgaacggcccgacgtcgctgctcaacatctgttcttcctcgctatcgtcctcgtgcgggatgcgcatcacgtacaccccggagccctggcgaatgtcgaccgtcccctgcagctccagcatcagcagcgcttcgcggacgatggtccggctcacgccgtaggtctcggcgatattgcgttccggcggcaggcgcgacccgatgggatagcgcccctgcgcaatctgtgcgcgtaaatcatcacctatttcctggtagggtttcttttccggcggaatgatagccttctccacaatatcacctgtgcgttatgagcctgcgagtcaatatcggccgctatcttagcaaaatttcagcccggctagcgccactcatcgtcaatatccagcgtcaattcccggctctcgcctagcttacggaaccagctggcggacgccttgggccgccgcgcacgattattttgcagatcgatttcaatcagcccgtagcgatttttaaaggcgttcatcggcgaaacgttgtcggtaaacgcccacagcatgtagccgtgacagttggcccccgcttcccgcgcgcgcagcgtttgccacagatgctcgctgataaaacggatccggtagtcgtcagcgatggtgccttcgccattgcgaaactgcccttcgttttccacgcccatgccgctttccgccacgaaccacggaatattgcggtagtcctgcttgatccgcatcgccatatcaaaaacgatttgcggataaatctcccagccgcgggagttattcatccgccgtcccggtagttcaaagggctcatagtagtaagccggatggaacggcgtctgcggatgccaggcgcgcgatggagccttaacccgatgcgggtagtagaggttaatccccagctcatcaacggtgttgtcgcggattatcgccagctcctccgcgtcataatcccaggagaccccgtgctgttcgagcagagccagtagctcaggcgggtagaggccgtggaccagcggatcgaggaaaacccggttataaaacagatcgtagcgttcggcggcgcgtacatcgtgcgacgcttttgagcgcggataggtgacctccgggttaagaatgcagcctaccgtgccgcgatagcctttctcgcgaaacagccggaccacttttgccgtcgccagcaccttgtggtgattccactgcatccaggtgccggtgttctgctcgtaaggccagcgcagcgcatccagataaacgcgggtctgcaccacgatcggttcattgaaggtgaaccagcgcgtgactttgtggttatagcgggcgaacactttctccgcgtactgcacaaacagctcaaccacctttttcgacgcccagccgccgtactgctccagcagatagccggggagttcatagtgctcaagacagatcatcggctcgatgccgttggccagcagttcatcgaagagctggtcgtagtacgccgcatagtcttcatcgaccgtgacgttttcataatcggtgagaaagcgcgaccagttaatcgacgtgcggtagtgggtcagccccgccagcttcatcaactgcacgtcttcgcggaagcggttgataaaatcggtcgccaccgccgggccgtagccgttatgccagacgcggcggtcgttcttgtaccagagatccggccaggaatcctggcccgctttcttaccgctccagccctcggtttgccacgcggaagcggcggcaccgaggataaagtcgtgggggatcgccatctttactgtcgtcattgtgtcctcatatctgttggctggcctgctcgttctccgcctggcgctgagcgttttccgcgcggcgggaggctattttgacgaacggcagatagatcagcaccgcggtcaggatgcagataagctgcgtcaccaccgcccccatcgaacccgccgtagagagccaggcgttgatcagcggcggggtggtccacggcaccatcaccaccgctttaccggcaaagccggcggcggtcgcgaagtagccaatgctgccggtcaccagcggcgtgatgataaaagggatcgcaaggatcggattgagcatgatcggcatgccgaaaatcaccggttcgttaatattgaacagacccggcccaatcgacagcttggcgatctctttcatctctttgcgtttggtggcgatcatgaccgcgatcagcaggccaatcgtcagtcccgatccgccgatgctcatataaacgtcccagaacggcatggtgatgatattcggcacctctttgccctgctcaaaggcgctcatattgacggtgatggctcccagcagcagcggttcgcggatcggtttgatcatctggttgccgtggatgccgataacccagaacagctgcgcgacaaacatcagcagcaggatccccggcaggctttgcaccacccgctccagcggctgctgcaccacctgatagaccgcgtcatacaggtacatgccggtggcctgatggaaaataaagccaaaggtggcaatcaccgtggtggtgataatggccgggatcagggcggagaacgacgccgatacgttgggcggtacggtatccggcatcttgatcttcagccccttgcggccctccagccagcagtaaatctccaccgacagaatggcgataaacataccgaggaacaggctacgggtatcggaaaactggcgcagcagcacatctttcacttcatgcatttgcccgtcgaccatcatttcgacggtggtcggcgtcacgcagataaagcagatcaccgccagcagaccggggaacaggctcttgatgccgttaatccgccccagctcgatgccgataagaaagaccgcgccaatattgagaaagttaagggtggcgtagttgatcgcgctggtaatgggtttcagcgccgccagaaaagagagcgcctgaaagctggcgagtccgtttttcggatccagcaccatattggagatcagcaccgaaaaggcgccgacgatgatcaccggcatcagggtaataaaagcggattttatcgccatgatgtagcggtagctgttgaatttcgtggcgaaactccccagtgagtcgatcagtttgtcctgcaatgccatagaggatacctcaggtttaagggcttttagcgcaccaggtgtacagccaaacacctattggcataccaaaaaatagccactgaggggaataagttctgtgattaagctcccaacccgttcattggcattccagaaaggcgataattggcataccgcatttgcggttttcttttccctgcgatcaattcctgtaaaagcgtgatcgcgatggttttttaccgcgccatgaagccatatccccctgaatgtctgtgataaactgcggttcaccacgtgatatcaggaatcggatgaatggctacaatgctggatgtctcaattcgcgcaggcgtctctaaagcgacggtttcccgcgtgttgaacggcacaggtcaggtgaaagagagcacccgccaacaggtttttaaggcgatggaagagctgggctatcggcctaactttctcgcccgctcgctggcgaatcgcacgagcaacagcatcggtctggtggtttccacctttgacggcttctattttggccgcctgctgcagcaggcttcgcgccagacggaagcctggggcaaacagctgatcgtcaccgacggccacgatgcgccggagcgtgaagaagaggcggtgcagatgctggccgatcgccagtgcgatgccatcgtgctctacacgcgccatatgagcgaaaagaagattatgtcgctgattgagtctatcgccatgccgctggtggtgatcaaccgcgacgttagccaggcccgggagcgctgcgtgttcttcgaacagcaggacgcggcgtttcaggcggttgagtacctcattacccagggccatcgcgatattgcctgtttgaccgtgccgatgcacacgccgacgggtaaagctcgcctggaaggctatcgcaacgcgctgaagaagcacggcatcaagtgggatccggcgaaggtgaaatacggcgactccaccatgagccgcggctatgaactctgctgcgagctgctggaagagaaaacgccgtttagcgcgctgttttcctgtaacgatgatatggcgctgggcgcgtcgaaagcgctgcatcaggcagggctgcggatcccgcaggatatttcgctgtttggttttgatgacgcgccgagcgcgaaatggctggagccggggctgtcgacggtctatctgccgatcgataacatgatcaccaccgctatcgatcaggctatcaagctggccaacggccagccgatcgagaccataccgccgtttaccggcaaactggtgctgcgcgagtcggtcaccaccgggccgtattacgcataattagcgggcccgataagcgaagcgccatcgggcagcgccttacagcagctcgagcgcgagcagctcttcaatggtctggcgacgacggatcagccgcgctttgccgttgtcgaacagcacttccggcagcagcggacggctgttgtagttagaagacatcgacgcgccgtaagcgccggtatcgtgcagcaccagataatcccccggcgccaccgcaggcagcaggcgggtttccactttccccccctcctgctgggtaaagacatcgcccgattcgcacagcggcccggccactacggtttccacctccgccgcggcgcgcagatcgcggccgtccgcggcgagagcggtaatatggtgatagctgccgtacatcgccgggcgcatcaaatcattaaaaccggcgtcaatcagcacgaagtgacggctgcccatctccttcacgctgcgaacctgagaaaccagcacgccggactccgccaccaggaagcgacccggttcgatctcaagcgcgaccggatggcccagatgtttagcgatctgctcgcgcgccgcgttccacaggccgaagtagtgatcggtatcgatcgcctcttcgtcgtcgtgatacgggatcgacagtccgccgccggcggagatcgcctgcagatcctgcccgaattcaacaacctgacgcaccatcgcgccgcagacctgttccaggtgcccatagtcgaccccagaaccgatatgcatgtgaatccccaccagctggagctgatagcgacgcatcacttccagcgccgccgttaaatggctgtgccagatcccatgcttgctgttctcgccgccggtattggttttttggctgtggccgtggccgaagcccgggttaacccgcagccagacgcggtggcccggagagacttcgcccagctggctcagcatatcaattgagccggcgttgaccgggatctgcagctctttcacccgcgccagggttgcatcgtcgatcagatcggcggtaaagacgatatcgtccggatgctgatgcggatcgtacccggccgccagcgcgcgctcgatctcgcccagcgacaccgaatccaccttcacgccctgctcgcgcatcaggcgcagaatgtggatattggagcaggccttctgcgcaaaacgcaccacgtcgaactggctcaattgggcaatctggcggcggataatctgcgcgtcgtaaacccaaaccgggcagccgaattcggcgggcagacgcagcaggttttctgcgctcaggtcggtatcggtagcgtaaagcgagtgtggcataaggaactccggtgctgtgtgtgcgttatttctgttttttacgattacgccacagcgcgtacgcaataaaaaatatcgttttattgccagtctatgcaaaaatgatatggcttgcgccacttaaggaacccccatgcccgccgtcaacctgcgtcatattgaaatctttcatgcggtgatgaccaccggcaatctgaccgaggccgcacgcatgctgcatacctcgcagcccaccgtcagccgcgagctggcgcgttttgaaaaggtgctggggttgacgctgttctcccgcacgcgcgggcgcctgcagcccacggtccaggggttacgtctgtttgaagaggtccagcgctcctggtacggtctggacagaatcgtcagcgccgcggaaagcctgcgcgagttccgccagggcgagctgtcgatagcctgtctgccggtcttttcgcaatcttttctgcccccgctgctgcaatcctttttaagtcgttatccgcaggtcaatattcagatagtgccgcaagaatcaccgctgctggaagagtggctgtcagcccaacgtcacgaccttggcatcaccgaaacactgcataccccagccggtacacagcgaaccgaacttctctgtcttgatgaagtttgtgttctgcctcctggccacccactggcccaaaaatcggcactcacgccgcaggattttgaaggcgaaaactacattagtctttcccgtaccgacagctatcgtcagctactggactcgctctttaatgaatatcaagtaaaacgtcgcatggtgattgaaacccacagcgccgcttctgtctgtgccatggttcgcgctggcgtggggatctcagtcgtgaatccactcaccgcaatggactacgccagtagcggagtcgttatccgccgatttagcgtttcggttccgttttcagtcaatctggtgcaccctttacatcgcccttcatctgcgctggttgatgcatttagcagccatctaatacaccaactacctgatatcattgaatcttataactgctggataaatttataaattcttaaaaaacatatcgcatagctggctcaaaatattttgttaatttctcacatgttaaaaaataattaacaatatatttaaagcgtgtcagcagcaccggccattcacgatcccccccatcagttcatgaccataagtaaatttcaaaacgagcacataatattcaaccaatggtgaaatatagatatgcgtcataatattattataatgatataattcaacccaaatgcatacataaaatcgataattaaagataaactgcatgtagaattaactacaactaattttatttaagaaaaacttgaatataatatttatcgaccccccccccattatggatgatggatcccatgaagatgaaatacacatttgcacttcctttacttatgactctgagcacagtcatctctccagcggcgcatgcaaccggaatgaccccagaattttctgtattactcattaataccgatgataatggtgccagtatgaacgttaaaaatacggatgataaggccgcgctcctttacaccacgataaccgatattgcagggcctcagaataaaaacacaaaactcattgcaacacagccaattgttcgtgttgaggctggagaaactcagcgtgtacgttttgtgctggatattcagactccctttaccgttgaacaatataaacgtgtttcgtttgagggcatccagcaggcaaaaccagcgggtgctaagttaattacagctacaattcgccagacgattccagtgatcattcgcccaaagaacgtacctgactacaccaccccatgggataaattagtctggaaaaagacaggaaatacactcactgtaaataacccgagcccttatgtcgttcgcctgtcgcaaaaaaatctccaccgttccttccggtagtaaaggtatgttacgcaacacctggttactgccgggtgaaaccgaaactataaaaatggataaaggtgttactgacagccaaataaaaatatctccagcatcccgtttcggtattatggtacaggattacattgccactattaaaaataactaattcgctgttatttcagagcatgcattgccgtttctgctctggctcaaatggaattgtgcttcatgaaaaacagattttattcgggtgcatacctgtatccacttattgtcttctcttcttgcacgtttgctggaaaatttcctgaatcattatcaggcagggtcagctcatcaaatatggttcttgccagcttcgatattaccacgttgaaaaatcgtggtatttcccctgaagtcgctgagtatttcgcccacggagcacgtttttcgccggggatgcaaaaagtcagcctgacgctgaatggtgatgaaaagggcgatatctcgctgttcttcaataaatcaggtgagccttgctttgacaaagaatttaacgatttcgtcggattaaaagagccagataaagtgacagacaatgacgataaatcggatgcacgcgtctgctatgactatactgcaacctggccggattcggtcattaagctggaccccggtcaggaaagagtcgctctcatcgtgcccggtaatgcattggataatcgtaataaaccgaaaaactatcaaactggtggtaatgctgcactgctgaactacaacgtattcaccagccagagccggtacagtggtggtaactctaactataaccaggggacgtttgaggctgggttcaacgtcgccgactggctagcccgtagccaggtgattgtcactgattccaatggcgaacaagacagcagcgtactgtatggctacgttcagcgaacctttagcggtattgaaaagacgctccaggccggggcgattaacatccagagcacaccgtttagcttatccgggattaacggtgtgcagcttacgccagaaaccgcgttaaacggagaattgggtagtggtatcacagtatccggcattgcccgcagcgatcaggctcgtgtagaaattcgtcagaacggcgtattgattatgtccacgctggttccggccgggccctttacgcttaacgatgtccccattgccaacaacaatacagatttattggtcgaggttaaagagaccaacggttcatccagccagttcaccgtgcctgcggccaatttagtcggtgcccgtctgcgtgcgccgcagggatgggcattcgctggcggtacgctgcgtgatatcgacacaaagcatgacaaaccgtggatattaacggtatccaacggctggcagattgcacaggaaatcaatctcagcgcaggggttatgacagcggaaaaataccagtctctcgccgccagtactaactttgtgccatcaaaatcgctgtcattttatggcacgacgcttggcgcgtgggatcagcgcaacgatcattccggaaatcagtttcaattggggatgaactaccgactcccctgggacttttccgtcaacctgtcaggcacccacaatacggccggattccgcacgttgctcgacactcttcaggatgaagatgacgtcacaggcataaaaaatagctatagcgcatcattaagctggtcacatgcttatgtcggctcgttgtcattttccctgtcacaatctcagggatttgataacaacagtgattcccgccagttcatgctgaactggggaaaaactttcagatatgccactgtaaacaccagttggcagcatgcgttaagtacacccgatactgacaataacgatagctaccatgacaacgacaccttctacgtcagcatcaacatcccgtttggtcgccacaatgtacagagctatatgcgtgacgatggcgagaaaacccgttacggcctgcaggccaacggcccgttaagtcagaactcatactacaacgtcacagcagaaaaaggcgacgacgacaatgataaatacgttgcggcaggattcagttccaacatgcactacacctcgctgaacctgaacgcgtcgaaaactggcgatgattttaaaaattactcagccaatatatccggcggcattgtcgcgcatagtcagggcgtgacgttctcaccgtatgccgttgatgacacctttagtatcatttcattgaatgacaacgtctccggcgtagaggtttcaacaccacagggaccggtatggaccgatttctggggccaggcagtatctgcctccgccccggtttacagagtaaataccctacaaataaacaccgagaccctgccgaaaaatatcgacatcaataatgggataaagaaactaacgccgggacatggttcagttacccaggttaattttggggtgattaaagtacgacgcgccatgctaactctgcatatgccagacggtaaaccgatcccgaaaggcgaaacgctggttgacgctaaaaatcagtatgtcaccaccgcagtggaagacggagtggtctttatcaacgatgtagatgccacgccggaaatttacgccaatgtcgatcagcaaggccatcaatgccgtgtgcaattcactctggatgatcagaacagtgaacagagtttttatcaaaaagctgatgcaacgtgccaaccgtaaaaatggggttaatgatgaataaactaccttccgcactgctggtattcggattaagcaccagtgcttgtgtactggcggactataccgactgtaacgtgcaaattgcgcctgccagccaaaattacggaagaattcataaagatgaattgaattttactgcaacagataaaggacaggctgctgcgttaaataaacgacaggcccagttatcagttatctgtccacagaaagaagcgttcgacatttcattccttggtagtatgaccagcaacggcgatctgacgttctcggataccggcaaagtcatgttaacgataagtaatatatcttctgacgaaggagcattatttataaaaaggatttcaggaaaagatattagcaccgaatccgtatcctcactgcgaatatacatgggagataaagtaaaacctgccgatgcaagcggaaataccgtatcgatgcaaaatttcacagcaacactcaatatcgaaccgtgggtagccaaaagcacttacagcgatttagcgaacgataaaacactggaagggaatttaactgttcgtattgaacaaccgtaataactatttccaataatcgaaatattattacggtgaataatatgaaccgttaatcaacaaaagtgatcacttaaaatggagtttattatgcaatttaaaaaactgtcacttgccgcaggagtttttggctcttttctggcaacggcatttaccgcacatgctggtaccagcgccaccatgaccatcagcggtatcgtcaccccatcagcctgctcgattgccctgaccggtggtggcacgctggattttggcccggttcatgttgatgccctgccatccagcggcacctatacaatgaccccaaagaccattgataccgtcgttgactgcaaggataccgagcaggccgtggcgataagctttgtcgataaccgcaaagattctgtcgccatccactctgatgaaggcaccgatgccaacaccgctttcggcctcggcacagcggatagcatcaatatcggctcttacggcattaaaatcagcaaggtgaccgcggagtccactgaaggtagcctgctttccagcaccggcaaagccatgaccgatacctggagcgcactctcttccgatacctttgtcaataacggtaccagcccacagtacatcacctacaccgacgcgggcggtaacgccccggttgcgaagaagaactacaccttcaccctgcaggttacaccgtctatcagcagcgatatgaaggccatcaccagcaccgccgagtttgacggtaacaccaccatcaatatcgattacatgtaagggaagaaacaatgaaaacaggaatgtttaaatactctctgctggcggccacaatggctttttccgggctgacaatggcggtgagtccatccgcaacactgctggtaaaaggccaggtttctaccggtacctgcaccgcgacattgtccacgccaaatattgacctgggaacgatcagtaccgataaactaccagcgactgggtcatattttgtaaaagataccactaccaaacttgttgtcgactgcaccagcccgttaaaataccaaatatcaatgaccgataatcgcagtgacagcgcggtttcagcatcggatcttgggaatatgtcgagtggagctgctacaacgattatgggattgggaaaaaccgcagatggcagtaaaaacattggcggttattttttgtcattcatcgaagacggtagtaacagcgcagtaaatggtagcaccagcttatcagttacccgcattggtagaacaactgcatcagactccgattggaaagtactaccagacgctgctggtactaatacttatcattacgcaatgagtccactaaacaacgccgcaggtggcattggtaatgtcggttatatcgctttttcaagtacaggtgatgctgtgcctggagcttccacatcggctacatttgctctgctgtccagattctatctttccagtgaattacaatcaatcaccgaccaggaacagattgacggcagcgtgaccttcaatcttgattacctgtaatcggtaacagtgtttaagccgggaggaattctcccggcttttcataaacccctgacgtctttactgccgcttccttgagctggtttggccaggtctaaaaagcatctaaaattgggctaaccatgcgctttccagccctcagcatcaggaaagcataaactccaccgcgtccgccgcgtggatcgcggccgtatcaaacaccggcagcgggctgctctcttccggcaccagcaggccgatttcggtacagccgaaaatcaccccttccgccccctgctccgccagggcctcgatgacctgaagatagtagtcgcgtgaatgctcgctaaagacgccgaggcacagttcatcaaaaatgatctggttaatccgcgtgcgatcgtcagcttccggaatcagcgtatcaatagcaaactgctgctgcaggcggccgcgataaaaatcctgttccatggtatagcgcgtgcctaatagcgcaacgcggcgctggccctttgcgataatcgctcgtccggtagcgtcggcaatatgcaaaaacggcacgtcgcagcgcgtttctatcgcctgcgcgactttatgcatggtgttggtacacaggacgatcccctcggcgcccgcctgctgcaggccggccgccgcctgggcgaggatctcgcccgcgcgctgccagtcgccgcttgactggcaggcttcaatttcgtggaaatccacgctgtgcagcagcaggctggcggagtgcaggccgccgaggcgcgctttaataccttcgttaatcagccggtagtaaggaatcgtcgattcccagctcatgccgcctaacagaccaatcgttttcatcatccctccttgtgtgaggttttcagtaaaacaaagttgtgatcgactttccacttctcccgacgatcgtttccttttagaagattatgcgatagattaaatgaaacattgtttcatttaattacaggaccagcggatgtttatttttcataaagagaccacccttgaagatctgggtaatggcgtcacccgccgcatccttgcgcacgatggcaagatgatggcggttgaagtgaacttcgaagcgggcgctatcgggccgatgcataatcacccgcacgagcagctcacctatgtgctctccggcgagtttgagttcaccatcggtgatgaaaagcacgtagtcagcgccggcgatacgctctataagaagccggaaattatgcacggctgcgtctgccttaagccgggcacgcttcttgatacctttacccccgttcgtcaggattttctgcaaaagtaatctctcctgccccagggcatgccgggcatgcccaccattttctgaacttttccgctaataataattgtcataaagtatgtcgtagcataatgattagcagagcaattaatcccgcctgaatagcctcactgcgcctgccgctcatccttttctatgacctggcctcctgcaaaatgcgcgcgccagcacctttttgaaacatcgtttcgactttgatcacatttccgcgatcaaccgaatgactccgtaataaatagcaataaaataaaattaaaacggcgttttacaaaatcaggacgctgggtaagacaaaatcaaaaaacagatgttctccagggacgacaagcgcgcaaaaacgctcaacacacgcaccgttaacaaggaatgattcaccgctgacataccaggaacgcattaactttccggcggcatgggccgcgggaaaggcagtaaccccgaatccgtattacaaactcgtaagccaggtaggtatgtatgaatgaaaacagaatgctgggattggcatggatatccccctatatcatagggttgatagtctttaccgcctttccctttgtttcatctttcttcctcagtttcactgagtacgatttgatgagtccaccggtgtttaacggcatcgaaaactatcgctacatgctgaccgaagatggcctcttctggaaatcgatgggcgtgacgtttgcgtatgtctttttaaccatcccgttaaaactggctttcgcgctggggatcgcttttgtcctcaactttaagctgcgcggcatcggttttttccgtaccgcctactatatcccgtccattctcggtagctcggtggcgatcgccgttctgtggcgcgcgctgtttgctatcgacggcctgctgaacagctttatcggcgtacttggcttcgacccggtcaactggctcggcgagccctcgctggcgctgatgtccgtcaccctgctgcgcgtctggcagttcggttcggcgatggtcatcttccttgcggcgctacagaacgttccgcaatcacaatatgaagcggcgatgatcgatggcgcgtcaaaatggcagatgtttatgaaggtcacggtgccgctaatcacgccggtgattttcttcaacttcatcatgcagaccactcaggcgttccaggagtttaccggcccgtacgtcatcaccggcggcggccctacctactccacctatctgttctcgctctatatctacgacaccgcctttaagtacttcgatatgggctacggcgcggcgctggcatgggtgctgttcctggtggtcgcggtctttgccgccattgcgtttaagtcttcaaaatattgggtgttctactccgccgataagggaggcaaaaatggctgatatccaacaaatctctgaagcaagggacatcgccgaacgtgaagtcgcgcggacgctgcgtcgtgaaaaagtcagccgctcgattcgctacgtgatcctgctgttcgtcggcctgctgatgctctacccgctggtatggatgttctcggcgtcgttcaaaccgaaccacgagatcttcaccaccctgagcctgtggcctgcccacgcgacctgggatggctttatcaacggctggaaaaccggcaccgagtacaacttcggccactacatgctgaacaccttcaagtatgtgatcccgaaagtgctgctgaccattatctcctccaccatcgtggcctacggctttgcccgcttcgagatcccgtggaagaaattctggttcgccacgctgatcaccaccatgctcctgccgagtaccgtactgctgatcccgcagtacctgatgttccgtgaaatgggcatgctgaacagctatctgccgctgtacctgccgctggcctttgccactcaggggttcttcgtcttcatgctgattcagttcctgcgcggcgttccgcgcgacatggaagaagcggcgcagattgacggctgcaactctattcaggtgctgtggtacgtggtggtgccgattctgaaaccggcgattatctcggtggcgctgttccagttcatgtggtccatgaacgactttatcggtccgctgatttacgtctacagcgtggataaataccccatcgcgctggcgctgaaaatgtccatcgacgtcacggaaggcgctccgtggaacgaaattctggcaatggcgagcatctccattctgccgtccatcatcgtgttcttcctggcacaacgctacttcgtacaaggcgttaccagcagcggaattaaaggttaagagggaaatatcatggctgaagttattttcaacaaactggaaaaagtctactccaacggcttcaaggcggtacatggtatcgatctgaaaatcgcggacggcgagtttatggttatcgttgggccgtccggctgcgccaaatccactaccctgcgcatgctggccggtctggaaaccatcagcggcggcgaagtgcggattggcgaaaaaatcgtgaataacctcgcgccaaaagcgcgcggtatcgcgatggtcttccagaactacgcgctctatccgcatatgacggtgcgcgaaaaccttgccttcggcctgaagctgagcaagctgccaaaagaccagattgaagcccaggttaacgaagcggcgaaaatccttgagctggaagagctgctggaccgcctgccgcgtcagctctccggcggccaggcccagcgcgtggcggttggccgcgcgattgtgaagaaaccggatgtgttcctgttcgatgaaccgctctctaaccttgacgccaagctgcgcgcctcgatgcgcatccgtatttccgatctgcataagcagctgaagaaatccggtaaaccggcgaccaccgtgtacgttacccacgatcagaccgaagcgatgaccatgggcgaccgcatctgcgtgatgaagctgggccatatcatgcaggtggataccccggacaacctctatcacaagccgaaaaacatgtttgtggccgggtttatcggcgcgccggagatgaatattcgtcccagcaagctggttgagcaagcgggtcgcctgcatctgaccgttggcgacgggctgctgccgctaaacgacagattgcagagtaaggtcgagacccataagaaccagcaggtgttctttggcgtccgcccggagttcgtctccatctccgatgaaccgtttgctgaaggctcctgcgccggtgaaatggtgcgggtggaaaacatgggccatgaattcttcgtctacctgaaggttgccgattatgaactgaccgcccgcgtgccttccgatgaagcgaagccaatgattgagaaagggcttcatcgcacggtgcatttcaagttcgatctcaacaaatgtcatatctttgacgccaaaactgaacagaacatctctctgtgaaccctggagtattaaaatgaaaaaagtgcttttaagcgccgcaatctccgcaactttgggccttaccgcgttaccttccatggcgaaggatgtcgacctgcgtatgtcatggtggggcggcaacggccgtcaccaggtgaccctgaaggcgctggaagagtttcataaacaaaacccggatattaatgttaaagcggaatataccggctgggatggccatctttcgcgcctgaccacgcaaatcgccggcggcacggagccggacgtgatgcaaactaactggaactggctgccgatcttctcgaaaaacggcgaaggcttctacgatctgaataagatgaaggacgtaatcgacctgagccagtttgatgccaaagagctgcaaaccaccacggtggacggcaagcttaacggtatccctatttccgtcaccgctcgcgtgttctacttcaacgacgagacctggaaaaaagccggcgtcgagtacccgaaaacctgggacgagctgatggcggcgggtaaaacctttgagagcaagctgggtaaacagtattacccggtggtgctggagcaccaggacaccctggcgctgctcaattcatatatgattcagaagtacaaccagccggctatcgacgaaaaaaccaagaaattctcctacagcaaagagcagtgggtcgaattcttccagatgtataaaaagcttatcgacagccacgtgatgccggacaccaagtactatgcctcgttcggtaagagcaacatgtatgaaatgaagccgtggattcagggcgagtgggcggggacctatatgtggaactccaccataaacaaatactccgacaacctgaagccgccggcgaagctggagctgggcagctatccgatgctgccaggcgccaccgacgcgggtctgttctttaaacctgcgcagatgctctccattggtaaatccaccaaaaatccggaagcggcggcgaaggtgatcaacttcctgctgaacagcaaagaaggcgttgagacgctgggacttgagcgcggcgtgccgctgagcaaagtcgcggtgcaatacctgaccgaaaacggcgcgatcaaagaggacgatccggcggtatctggcctgcgcctggcgcagtccctgccggccaaactctcggtgtcgccatactttgatgacccgcagatcgtcgcccagttcggcacctctctgcagtacattgactacgggcagaaaaccgtagaagagacggcaattgacttccagcgtcagtctgaccgcattctgcgccgcgcgatgcgctaacaacccgttatcggtccctaccccgcagctccggctgcggggtatttttttagcaaggagtgaatgaatcatgaaaggcaaaatcatcccgctgagctttctgcatacgcaggacagcgaaaccggtcaccaggtgatccggatgacgccaccgcatgttatctgccaccgcaactacttctatcaaaaatgctttacccgggacggcagcaagctgattttcggcggcgcgtttgaaggccactggaactactatttactcgatatcgccaggcagcaggccacccagctcaccgacgggccgggcgataacacctttggcggtttcctttccgccgacgaccggtcgctgtggtacgtgaaaaacaaccagcagctgcgccgtgtggatctggcctcgctggaggagcaggtggtatatcaggtggatgaccaatgggtggcctacgggacctgggtcgccaatagcgattgcagccagatggtgggtatcgaaatcaaaaaaagcgactggcagccgctgaccgactggggcaagttccgcgcattctacttcaccgagccggagtgccggctgattaatatcgacctgcgcagcggcgagcagcgcgtggtattgcaggaaaaacgctggctcggccacccgatttaccgcccgtttgatgacggcaccatcgccttctgccacgaaggcccgcgcgatgctatcgatgcccgaatgtggcttatcaacgctgacggcagccatatgcgcaaggttcgccagcaccggtcgggagagagctttacccacgaattctgggtgccggatggttccgcgctttactatgtcgcgcatcaggaaaacgatccgcatcgctatctgtaccgcgccgacccggcaacgctggaaaatcgccagctgatggccattcctccctgctcacatctgatgagcaatcacgatggcaccctggtggtcggcgacggcgcgccgcacagcaccggcgatatacagcttaacgatccgtttatctgggtgtttgatattgccgccgataagcagactgcggtgtgccgccacgactccacctggaaagtgattgaaggcgagcgccaggcgacgcatccacatccgtcattttcaccggataaccgctgggtgctgtttacctccgataaagagggtatgccggcgctgtatctggcagaggtgtagtgattcggcaacgtcccggctcgcgcggtgcttagccgggctaccgctctctgcgggccggtagcccggacagatgcgcaagcatcgcctccgggacattatgcctctctgcgcgctgctcccgggggcggcgcaaagcgcctgcccgggctacagccgtctgcgacccgggaagaccgtcagaagaaatatttaaaccgcacccgcgcaccgtagcgttcatcggtgttgccgcttttcatcgccgatgaatcgagccatgacgcataggccccgagataaatattaaagttcggcatatccataatattcggcagatgccatgaggtatgaatggtgtgaatgtcgtagcgccccggcgccagaatcgcgcagtcgctatcacactccgcgttgacgccggacatattaaactggtcgattttgttatgcgcatagatatagcccagctccacgcgatgccataacgcattgataccggcgctgaaatccttttcatccgccgcgtccagatacgcggtgcttaagttcaccaccgccccgtcctcggcatcggttttcagcgtgttccagctcatcgtcatgccgtagccggtgcggctggactgatcgacccaacgtccattctgattctcataaccgtaagcattattaacgaggttactctccatcgctgccgccaccgaccaggcgccggattgccaggccgcgaccggacgcacgtaaaccacatttttacggttatccagcgcgttgccgtgataattctggtccacgaacagcgagctgccgtcctccaccagcgtattcacctcaaaataccagttatcgagatttttactcagcaggaagttgccgccgctgctgctgcgtccgcgcccctctttcatcatataaatatagccgtagccgtcgctatacagatcgttcgccgtgttgccggaatattcaacaaacgtatcctgatttagcgggaacatatcgtaggcttcgaagcgaccgattttaattttccagtcatcctgctgaccaaagaaaaaggccgcatcatcaagattcattttaccgttcatatccgccagcggctgcacgctgaatccggcatatttaccgttagcccctttgcgtaatccatcaaagcccagaagaatacggccgttaatatcccagcgctctttatctcccggcgcccagtttttattggcgctggttttcaccgacgtcaggctaccggtgcggctggcgccgtccatattaaactcaacatcgccatagaattttaattcaccataatcattaagttgtaaagcgggtttagccggtgcggcgctggccaccgtcgtcgctggcgcctcctgtttttttagcgcgcggatttccgcctccgcgctggccgcccgctgctctgtcgcctttagccgttgttccatttgcgccagccgctcctcaagggataacggcgcctgagcattagccagaggggtaaataaagacgtcagaacacacccgacccagattttattcatcggaataaccctttattatttagttaaatagtattttttatttatgggtaaagctcgacgacagtgacaataataacccgcccatcgtcgaagacgggttattaacaactattcagtaaaacttattccagctgccaggcgccggcttcggttaaataagccgaaccgttccaggcaaataaagacaattcgcgacgatcggcatccggatatatacgactgctaagacaggcctcgccatcattaacaaacacttcgacggaagagctatcgaagaatatccttagcttcagatcggcgccttcgttcaacgggacgctgcgggtgccgcacaggccatgctgcggatagtgccgctcgagcaccaggcgctgcatctgcgcatccacgtaaacgcgcaaaccttcgccgaagctgaggccatactgctcggcgctgctgttcaggccatcccagtgcaggatcacctccatcgcttcgcagttctccaccatcgtggtctgctggtttttcagggtcgtcaccggccacgggaagctggcgccgcgcatgctctcgacctctttcgccggacgcatctgcagtcgattatccgcgctcaggctcagttcacgcggcagcgacagcatgcctgcccagccatcctgctgctccggcagcggcgactcccacatatccagccagccgatgacaatgcggcggccgtcgggagtgaggaagctttgcggggcataaaagtcgtggccgtgatccatttccacaaactcgccctcacgcacaaacgcctgccccggccgccattcaccgagcagatagccgctctggaacaggttgcggttttgatagcctttagccgccagcccctgcggagagaacatcagaatatgcttgccgttgagggcgaagaaatccgggcattcccacatgtagcccatctctttttccgcctcgtcaaggacgccggcgtcctgccactggcgcagatcggcggaacgatacagccgcacctggccggtgtcgccatcgcgagcgccgacgatcatgtaccagctgtccccttctcgccacactttcgggtcgcggaaatggtgcatgcccggcggggtgtcgaccacgatcccctggcgctcgaagtgaatcccgtcgcggctggtggccagacattgcacctgataaaggttggcttcatcgctgggatcgccatgaaatttatgcccggtataaatcaatgccagcgtatcgccatccaccaccgcggagccggagaagcagccgtctttatcctcggggccttccggggccagcgccaccggcagatgttcccagtgcaccagatctttactgcgcgcgtgaccccagtgcatcggcccccatttggtggagtacggatggtgctggtaaaacgcgtggtaccagccgtcaaaccagaccaggccattgggatcgttgatccagcccgcgcgggcggccaggtgatagcgcggataccagcgcaggttcagctgttcatgtttagcctgcagttcttgctcagcccgggaaattgaatacgtcatattcattactcttttgattcagatagcggaagtttgcggcattagcgggtccgaagaggacttactggagcgcaacaagaagatggagataaaggtggtgcagaacaccagcagtcccataatcagataggactgggcgaagccgtatttctcatagctatagccagcgagcggcgacagaaccgtcgcgataaccgagctggtgcaggcaaagccgaccagatacagcgtggatgaaagacgcttgtcgaagtttaagctgttgtatttaaagatagataccagcagtaccggcagctcgacggcgtggagcagcttggtgatggagatcagcagcggcccctccaccagcccggaagccaccatacgcatggccatcaccattccggcgaagatcaggccgtttttcgcgccgacgcggttaaccagccacggcgcgcagaacataccggcggcttccaggaacacctggaacgagttcaggtagccgtacatcgcgttgccttcctgcagggtcgggaactgggaagagaagtagaccgggaactgctggtcataaacgccgtagatgcaggtgccgatgacgaagaagaccagcgcccaaaagcgcggcagggtcagcagacgcagggcgtcttccagcgtgactttaccgccggataccgcctcctgcatggcatgcggcgcggaagagacccgcagtcgcgccagtaggaaaaaaaagaccagtccggagcagctggccaccgcgaagtttaagtgcgggttaatgttgaacaacaaaccggcgaagaaggtcgccaccgcccagcccagcgagccccacatccgcgccttgccgaattcaaactggctctggcgcgcgacgcgctcggtgtaggactccagcacgccgataccgccgttgaaggtcagtccgatataaatcccgccgaagatgctgccgagtaagacgttaattttgaggaggtagccaaacgccatataggccgggccggagaggatcagcagtacggtgatgtaccagagcaaatttttacgcaggccgagtttgtcctgaataaagccgtagcacacctgcgcgaaaagcgcggagacggaaagcaccgagaagataattcccgtatcccccggcttaagccccacttcctgatgtagccagatagagagcagcgaacctgaagaggaccaggtcacgaaaaagaaaaagagtaacgcactgagtaacggatagctgtgagagtgatgcgctttcatcatgacattctcatgttggagtaatgctattatggtaacgttaacaaaaagcgaaactcacttcgttttgttgagattcatgatgttaatcacaaaagttaacgttaacataaaagggatgagatctcgatcaaatattcatcttcttcgctcgcgctacgtgtacgatagaatattgtatgatccttttacatcagtaacttagttgaccccgctgctggcggcaagggtggagcacttaatatggcatctctgaaggatgtagcaaagctggcgaatgtctcgctaatgacggtctcccgggcgcttaatagcccggaaaggctcaagccggagaccctggctcgggtccaggcggctatcgaagagaccaactacgtccccgacctgtcggcgaagaaaatccgcggcgctcacgcgacgccaaacaccatcggagtactggcgctggataccgtcaccacgccgttctcggtggagattacgctctccatcgaagagaccgcgcgggcgcacggctggaacagcttcgtggtcaacatgttctctgacgatagcccggacgctatcgtcgacctgctgctctcccatcgtccggacggcattatctataccacgatgggtctgcgtcaggtgccgctaccggccaagctgttaacccttccctgcgtgctggccaactgcgaaagcctgcacgacccggtggccagctatatcccggacgacgaacagggtcagtatacggcggtgcaggctctgctggccgcgggctatcgccggccgctgtgcctgcatctgccggcgaatcatctggccaccgtccgccgccgtcaggggctggaacgcgcctgccgggaagcgggtgttgacccggatacgcttgctcactgctatatggcctacggcgatgagcactatcgcgatattcccgcagtcgtgctggcccatattcagcagcgcaagccgcagttcgactcggtgatttgcggcaacgaccgcatcgcgtttatggtctatcagacgctgctggcgcgcgggctgcgcattccgcaggatgtggcggtggtcggttatgacaatatggtggggattggcgatctgtttttcccgtcgctctcaacggtgcagctaccgcactatgatatcgggcgcctgagcgcccagcacattattaacggcgacagccatcgggagacggtgaaagtagccagcccgtggctgccgcgcgagtcgttgtaattaattgccgatattgcgcagcttctcgccggacatcagcctgcgttcaatatgctccagggtgacgtttttggtttccgggatcagccagaacgtcacgccgataaaggcgacgttcagcgcggtataaagccagaaggttcctgccgcgccgatcgcgtccagcagcgtcaggaaggtcgcgccgataatcatgttcgacacccagttggtggtggttgagcaggtgatgccgaaatcgcggcacttcagcggctgaatttccgaacacaggatccacaccaccggcgcggcgctcatcgcatagccggcgatacacatcatggtcatccccaccgacagccaggagagaccgctggaggcggtgccgttatcaaactgcatcagacagtagcccagcaccagcgtgccgatggccatcacgctaaaaccgattttcagcgccggcttacgtccggccttatcgacggtaaagacggcgataaaggtggcgaacataaaggtcaggccaaccaccagggtcgcgaccatctgctgttcggtggtggtgaagcccgccattttaaagatgcgcggcgcgtagtacatgatgatattcataccggtaaactgctgcatcgcctgcaacagcatgccgaggaataccgcccgccgcacgttgcggttgaccttaaacagcgcccagccgccctgcttcagcttcaggctttcgcggatctcgttgagctcgtcacgggctttttctgacgtgtcgcgcagcatccgcagcacctcttccgcttccacgtgacgccctttttccgccagccagcgcgggctgttcggcaggaagatcaccagaataatcagcaccaccgccggcagcgccagtacgccaagcatcgcccgccagttgccgctgtagctgaacgcggtgtcggagagaaacgccatcacgatacccagcgtcaccatcagctgatacatgctgatcatcttgccgcgcacgttttcgctcgccatttccgacaggtacagcggcgcggtataagaggcgatccccacggcgaccccgagaacgatccttgccaccagcagcatttcgacgctggtcgcaaacgcggagcccacggagccggcaacgaacagcaccgcgcccaccatcaggctgtatttgcgcccgaggcggaaagagagccagccgttaaataacgcgccgatggcggctcccagcatcatgctgctcaccacccactcctgcaggcggctggataaaacaaaatggtcggtaataaagggcagcgccccggcaatcaccccgatatcgaggccaaacagcaaccctgccaccgcggcggcaatggagacaaactgattcatgcgccgggtatcgcgctgcgtacgcggcatggttgtagagtcgtgactgagagtggtcatttttttcctgccagacgaagtaagacatacgatgaaactacgggatcggcggcgtaaggtgtcaggcaggacacgccaaagatatggattaagttgctacaggcaatggttttgtgatggacattcaactttcagaagagcagaaaataagcatttcatcttcaacaacccctgttacatatagatacttacctcaaaaacaaataaaccatatggactatttcagtttcatcatatggacaattgttattcagacataaaaaaaccctgccgaagcagggttctattttgcgctgataacgcggcaaatattagcgcgccagccagccgccatccaccgcgacggtgtagccattgatgtagtcagaagcgctggaggccaggaagaccaccggccccatcaggtcgctcggcagaccccagcgtcccgccgggatacggtcgaggatctcgctgctgcgctgttcgtcggcgcgcagctgctgggtattgttggtcgccatatagcctggcgccaacgcgttgacgttgatgccgtgcttcgcccactcgttcgccagcagacgagtcacgcccatcaccgcgctttttgacgccgtgtaggaaggtacgcggatcccgccctggaaagagagcatcgaggcaatattgataatcttgccgccggtaccctgggcaataaagtgcttcgccgccgcctgagacataaagaacacgctcttaatgttcaggttcatcacgtcgtcccagtttttctcgctgaattcgatcgcgtcttcgcgacggatcaggccggcgttgttaaccaggatgtcgatatggccgaactccgccaccgcgcgctccagcagctgcgggataccgtcaatctggcgcagatcggcggtcaggctgagaaaacgacggcccagcgccgtaacgcgctcaatagtttccgtcggttcaacaatattgatacccacgatatcgcaaccggcttccgccaggcccaccgccatgccctggcccagacccgtatcacaaccgctcaccacggctactttgccctgcagggagaatgcgtcgagaatcatacttggttccttaatctttcagagcctgtgtaggtacaggcaaggttctgatagtccagcctgcggcttgtgcagacccttatggtttgaagaactcgcagggattgccccttctaaaaataaaacagagttccgttttacagtgaggacatcttagccctggctaaattcattttcaattattattaaaacatcgtttcaattttaaggctgttaaatgttaaaaatgcaaaacagatcacgaagcggtgattgataaaccgtgaaatccctatttaattcaataaaatacaatgaattattcaaactttaaaaaaagacggcggatcgaaaaaaaacggcaggaaaacaaagagcgcggggatgccggccgtactgtcagcaaaaaagcgcgatctatagcaagaagttgttgcgaattgcgtccgtcatcacaaataatgaaacgatgttttgataaattaacacccatcttttaaatctacttccactggccggtcaacgcaggcgggcgacatctcaggaaggaaaaggagtacatcatggctaaaggcatgcgggttaaactgaattatgacgtcagccgcgatccggacaccggcgcggagatcacccgcttaaccccaccggaagtgacctgtcatcgtaactatttctatcagaagtgtttttttaacgatggcagccacctgctgtttgccggcgaattcgacggcaactggaactactatctgctggacctcgcaaaggccgaggcggtgcagctaacggaaggcgccggtgataacacgtttggtggtttcctttctccggatgataaatccctttattacgtgaagaacgaccgtacgctgctggaggttaacctcaccacgctgcaagagcgtgaagtgtatcgcgtcgccgatgactgggtgggctacggtacctgggtggccaacagcgattgcaccaaactggttggcatcgagattgccaaaagcgactggacgccgctcaacgactggcagattttccacgatttcttccacaaaggcccccactgccgcctgctgcgcgtcgacctgcaaaccggcgaaagcagcgtgatccacgaagagaggaaatggctgggccatccgatttatcgtccgttcgatgatcataccgtcgccttctgccatgaagggccgcacgacctggtcgatgcgcggatgtggatggtaaatgaagacggtagcaacgtgcgtaaagtcaaagcgcatgcggaaggcgaaagctgcacccacgaattctgggtaccgaacggctccgcgctggtgtacgtctcttatctgaaaggccagcagggccggacgatctacagcttcaacccggataccggcgttaatgaagcggtgatgcagatgccggcctgttcgcatctgatgagtaactttgacggcacgatgctggttggcgatggttccggtaccccggtggacgtcaaagacaccagcggctacaccattgataacgacccgtatctgtacgctttcgatgtcgcgaagcaggcctattttcgcgttgcgcgtcacgatacctcctgggcaaccgtggccaatagtcgccaggttacccacccgcacccgtcctttacgccggacgatagcgccattttgttcagctccgataaagacggcaaacctgccgtgtatatcgcgaagctgccgccccagcctgagatgctgaaggcatagcgttagccactgtttgagttagtgtttctgtaactggccttgccctcctttcggagggcttttttatgcccggcgttttccccggatcgcgctgcgcttatccgggctacattccgtgccgatggggcgcactgcgccgctccgggaagagggattaataccaaaggaaaaccccggctgaccgctccggggtaaacgatgaggacattttttaagttagaacgagtaggcaacacctacgcggaaacgggtctggcggtcgctgcgatcgttgacgccaacgttgccgagctcgccgtacggcgcccagtttttatccagcttgtaggcaaccttgaggttgtactcctgcgagtacggtttgttgtcgttgcgcttaaccccttcggtactgcgcgcataaacgtagttcagctccgtacgccagtcgccgaagacgtaaccggcccacgcatcgccgcggttaactttgtcatcctctttccctgcattcgccgggtagcgggtatagtcgtaacgatagcgggcggcgacgtagaagccattatcgaagctgtactgcacgcgcaggtttggcttgtagatcgagcggctatcgttactttcaatattgaaccccggcgtgaccgagaagtttttattcgccttccactgccaggtaatgctctcttcatgaccattaccgacgaaatctgaataaggctggctggtgttatcgccgcccgacttccacttcgcctcaacggagaagccaaagccgttagcgaaacgatgggagacggagacgcggtcggcgttgctcttatccgatttgccgccgtcaatgaattcgtgacgtaaatctaccgtgacggctgaagccgcgaaagacatgccacagagtgcagcaagggccagagatcttgcgaacataaattacccctcataattaaaatatcgtttcgtttttataaaaccgtattttattttttaggcaataatgttttagtgatcgcgatcgtaaatatttgtttcaaaaaaggtggcacagaaagacgtgacaacgctcaacaaaatagcgcgtcagaaaggaatttttggcagggtaacgcctggcgggaagcaaaaaaaagcctccacagggaggctcagttaacgcatatatcagaaggggcttattcgcgttcaaccgccagcgccacgccctggccgccgccgatgcatagcgtggccagccctttgcgggcatcgcgtttaatcatctcgtgcaccagggaaaccagaatgcggcagccggaagcgccaatcgggtggcccagcgcaatggcgccgccgttcacgttcacccgccgctcgtcccattccagtaccctgcccaccgaaatggcctgagcggcaaaggcttcgttggcttcgataagatcgacttcatccagcttccagcccgcgcgttcaaggcagcgacgggtggcatggaccggcgcgatccccatcagcgccggatcgacccccacgctggcaaaagcgcggatccgcgccagaatcggcagccccagctcctcggctttagcttcgctcatcatcatcaccgccgccgcgccatcgttaatgcttgaggcattgccggcggtgaccgagccctgctggtcaaaggtcggcagcaggctggccagcgcttctgcgctggggtcgacgcgcggctgctcatcggtatccaccaggcgcggagtaccgttgagttcgctggtcaccggcacgatttcatcgcgaaagcgtccggaatcaatcgcccgccgcgctttgtgctgcgagctaagcgcccacgcatcctgcagttcacggctgatgccatactcgcgcgccaggttctccgccgtcacgcccatatggtagtcgttaaacgcatcccacaggccatcgtggacaaggctgtcgataagctggctattgcccaactgggcgccggtacggctgtcggtcagcacgtgaggggcgcggctcatattctcctgcccgccggcgatcactacgtccgcttcgccgcactgaatcgcctgggtcgccaggtgcagcgccttcagtccggaaccgcagacgtcgttgatggtaatagcagaaacggtattaggcagcccgccgcggatcgccgactgacgcgccggattctgtccggttcctgccgtcagcacctggccgaggatcacctcatcaatactttgcggatcgacgccgctgcgctcaacaagcgccttcaccaccacactgcccagctccaccgccgaatgacgcgacagcgcgccctgaaaacagccgattggcgttcgcaacgcgccgacgattacgacatctttcatcctctacctctgctccgcctctgcgcaaagaaacagcatcatagtagtgaattgttatcaaaaattttcgcaattgtttaaaaaaagtgaggggaatcacaaagatcgtcggcgatggcaaaaatggcccctattcgcgcccgtgcccctgcagatgctgacgcagccagcttcccgcttctcccggcggcgcctttttattccacagcaaatcggtggagatcatccgcggccagccggcaatatccagcgccaccaggcttccgctcccggcgaactcctccaccagcgcgctgggcaaaatacaccatcccaacccctgcgccgccatgctgaacagcagcagatagttaggcgccgaccataccagaccgcgcgccggttccgccgtattttccagataggtgctcaggcgcagctcgcgccagctgaacagctcatcgcgggtgacgctgccctgggccgccagcgggtgccggggcgccacgaagatagccatttcggtttgcatcggcagccggatactgcctatctctgtcgggtagctgtccctggcctcaatcagccccacctgcgcccgctccttttgcagcagatcgataacgtcgtcgtcttcgccaatcagacactcaaattcggtgtgcggaaaacgacgatcgaactgcgccagcagatcttccagcacatcgggatgcagcgtatcggagagcacaaaggtcagacgcgcttcggtgttgccagacagcgaaatggccagctcatccagcctgtcgctggccgccagaatcgccttcacgtagctcaacacctgttcgccctgcggcgtgagcgtcggctgtctggaggtgcgatcgaacaacgtcacgccaagatcggcttccaggttggcgattgcggtgctgatggtggactggcttttgcgcagccgccgcgccgcggctgagaatgaaccgcaggccacggattcgacaaacgcggttaaagcttcgggagaatagcgcatgaactatctactttatcgatggatactatcttttgtttatcacatttatccataaaatgccgggtaatttcatataaagaccggaggcaacaagccatgcaacaagtcaacgcccagcgcaaaacgctgacggaacgggtaatccacgcgataagctttgaaggtctggcgacgctgatcctcgccccaaccgccgcatggctcatgcagcgttcggtcgttgaaatgggcgggctcagcatcctgctcgcgaccctggcgatggtctggaacattatctataacgccctcttcgaccggctgtggccggtaacccgggtcgtccgtaccctgcgggtccgcgcgctgcacgcgatcggcttcgagtcaggctttattattatcggcgtcacgatggtcgcgctggtgctgggcgtttcgctgatgcaggcgtttatgctggaaatcggctttatgctgttcttcctgccctacaccatggcctttaactgggtctgggatatgctgcgcgagcgggtcatcaaggttcgccagcagcggatcgccgcccgccagtaatctttagcaaagcgcccggccggtaacgggcgctccgccgcttcatttcttcgccagaaactatcgccacagctcatccataaatgtgctaaattgcactcctttttgttcgttttctggttgataaagtcgcataatgtctaaaatttggtctaaagaagaaactctctggagtttcgccttatatggcactgctgtaggcgctggcacgttattcttgccgatccaactgggatccgcgggcgctatcgttctgttcatcaccgcgctggtcgcctggccgttaacctactggccgcataaagcgctgagccagtttattctctccgccaacatcgccccgggcgcagggatcaccggcgccgttaatcactattacggtaaaaagatcggtagcctgattaccggcctctatttcctcgcctttttcgtggtggtgctgatctacgccgtcgccattacgaactcgctcgcggagcagctctccagacatgtgcccatcacttctcaggtcagggcgctgctcagcctgggcgtggtgctggtgctgaatctgatctttttaatgggccgccacgtcacgattaaagtcatgggctttttagtcttcccgctgatcgcctgtttcctgttcctctccatctatttaatggggagctggcagccggcttatctgaccagccagatgcagctgaccccgcacacgttccaccaaatctggatctcgattcccgtgatggttttcgcttttagccatacgccgatcatatcgacttttgctatcgatcagcaggagaaatacggcgagcaggccatgggtaaatgcaaaaaaatcatgaaggtggcctacaccctcatctgcgccagcgtgctgtttttcgtcttcagctgcctgctgtcgataccggcgggctatattgaaaccgcccgccatcaaggggtcactattctttccgccctgtcgatgatgccggggtcgccggcgtggctggcgatcaccgggattattgtggcggtggtggcgatgtcgaaatcgttccttggcacctattttggcgtgattgaaggggccagtgaaatcgtcaaaacgtccctcgcccaggcggggattcgtaaaagccgcgcgtttaaccgggcgatgtcgatcctgctggtttcgacgctgaccttcgtggtgtgctttatcaatcccaacgctatctcaatgatttacgccgtcagcggcccgcttatcgcgatgatcctgttcatcatgccaaccctctcgacgtatcttattccggcgctgaagccctaccgctcggtaggtagctttattaccctggttgtcggtttgctctgcgtgtcggtgatgttttttagctaatcctcttcgtgcggcgagtcttttcctcgccgcacgttctgccaacattctccccccaccaatctccctgacggacatacacttatcccttgcacacctagaaagcaggggtttatatgtccagcgtaaaattatccggtactgcgacgttaggcgatcgtcaggtttatcgcctgggatacggggcgatgcagcttgcggggcccggcgttttcggcccgccaaaagatccgcaaaccgctatccgcgtactgcaggaagcggtcgagtcgggcgtcaatcatattgatacctccgatttttacggtccacacgtgactaatcagctcattcgccaggcgctgcatccctattccgccgatctgtgtatcgtgaccaaagtcagcgctcgccgcgacgataaaggcaactggctgcccgcgatgtcgcccgcggagctcactgcggcggtggaggacaatctgcgcaatctgggcctcgacgtgcttgaggtggtgaacctgcgcagtatgctcggcacgcatggcccggttgaaggttcgctggaggggcccttaaccacccttctggagctgaaagaacgcgggttgattcgccatatcgggctgagtaacgtcaccgccagacaggtgagcgatgcgcaaaaactgacgccaatcgtctgcgttcagaaccaatataacgtggcgaaccgtcaggatgatccgctgatcgacgagctggcggcgcaaaatatcgcctgggtgccctttttccccctcggcggttttaccccgcttcaggcccgggagcttaacgacgtcgccgcttcgcttgacgccacgccgatgcaggtggcgctggcctggctgctccagcgctcgccgaatatcctgctcattccgggcacctcctcgctacagcatctgcacgagaatctggccgccgcgcaattaacgcttccaccagaagcgttagccattctggataatctccagccccactcctgatttcaggcttctgcggatcgatattcgcagaagccttctcctcaatatttgcctggaattaccttaacgccactggcactatacatcctacaaattaggcgttatccgctttattctcttacggataaccctatgcaaagcatagatttaaactttttcgactggcctcctaattggaggcttctgtcgtttttgtctcgccaaaattttcgaactcttgattacaggaaaaacaatatctcattcaaagtttatacaaatcaatttagctgcaaagatagctaacaacatcaaatgctcataaaaacatctggttaacacaatcagaatgtttgtattgctatataaaaaatcgaccacacacaataacaatttacaaggatttcacatgacagagggaacgataaagacgagtaagtatgaaattattgctattttcagggaagagctccgaaagcaggcggagatagaagtttttgttaataacaaaagcactattacccagctaacgcgggtagattttgccgagtttcatatctccaccaccagcaaaatccccgcggggcataaagttaaatttattctgcatagcgattcagggaaaatcgagttttgctctacgctaaagaaaagctatgccggcggtgaagggaaatgcaggaaggtcgcatttaccttaccggagtgtatccaggtggtacaacgccggcgcgatccccgattccgtctgcgccacgagcacgaattcttctgtcacggccgacacaaaaacggagaaaactatctattcgaaatcaaagacatttcggacggcggttgcgcgctgatgaccaggagccccaatctgaaattcctcagccataacgccatcctcaagaacgctatcctcgccctcgctgaatatggcgaaatcaccgtagatttagttataaaaaatgttgttatggtgactttagatgataacgagaagtcagatagctactaccagatttcctgtcagtttaaatttcgccatcttgataacaagaagcgaatagagaaagtactgctcgacttgattatggaagccaagagaaaaaagagagtctgaaccattggacagtatattactttacactgatgacaatatcatcgggcaatcaatccatgattatatgattgatcgcgccagggatatcaccaccctgaaatttcaggatattgtgaaaggggtcagcgcctccccggcagccaccgttattatcaatatcatccacaaagatatctctgcggccacaacggtcgcattactgaacactttgcgcaagcgcctgacgcattgcgcgctgctggtgctgatcgtcaaaagcgagctgtccagcctgttccgggagctgcttgatctggaaaacctgttgattctgaccgaaaaatcctcgctggcagattactcagccatcatcagcaggccctcaaccgccgagggctgccaggggctatgcacccgccgcaagctgaccgccagggaacttcaggtgctggagttaattattgcctgcaataacagtaaaaggattgcggtgcttctcgacattgatcataaaacggtccacagccataaggtacatattatgaagaaactcgggatgaataactcgcgaacaatgaacaaaagcatagtcaatatgtaccagtgctaaaaccaaaaatatgtgggtgaccaatcaaaacccgataatttattggcgataagccattaataatcattcccatcggtagaaaggtcacctataatattctcctctctttacctctgacctgatttttgacgagagataatgaacgcaactcttttttccaggcataatttatcacgtagcgatatatccgttcgttatgtctttcaaaaaatgttttccccaaaaggtacgctcgtcgccgttgagtgcctgagccgctttgaccgcctgtctatatcgccggaaaacttctttcgctacgccaatacgggactacgcgaaagcatttttatggaacagctggcgcttattgaaaaacataaacagtagtttaagcaaaatgctatctcggcgacgattaatgttgatgaccatatacttaacgtattgcaacgcccggagattaaagcgctcgtcgaccaaatcggctgcgtccattttgaagtgaccgagaattcccataatcttttgaataatgctctcgcaacctggaataacccgcaaagcactacgctctggctcgatgattttggctctggcaacgccggtattcacgctattcgcgactatcatttcgattatgtcaaaatcgataaagacttcttctggcttttaatgcaaaaagattccggtcgtccgttaatggatgccctcgtcactttcctttcccgcaaccaccataatgtgattattgaaggtgtagaaagcgaagcgcataaggcctggttgcagggcatggaatggtttgctattcagggacactactggaaggaagtgagcattgaacaattggtccaggaagatatcaccgcataaataaatgccggataactccggcatcaaaagtcatactcgcgcaataccctctccccttcaattataaacgagctcccatgttgcccaactggtcaacgggccgctggttgctttttccggcgcgggggtcacgtagccgatgtaataggtaaatacgccgccatcgaccgctttttcgaccagcggcacccggttttgcaaggggtcggccgggacgattttattacttttatcgagggtattattatcattggtcgacagcgcgaggaaaatatggctggcgccgtccgcccgcgtattcctcagatagccggcattttcattgcccaccgcattgaccgtaaagccgtcaacccagcggacgttaaccaggcggatctcgtctttatccgccgcgccgccgtcgtgacgcagctggcagttcgagagttccagcgtaaaaggctgcggcttcataaatgccccggcaccgcgatcgtgtacttcggccaggctgaccggcgccagccagacgctgccgctccccgcgttgttgccgccgttcagcgccacgctacaggagatatccgtcacccgtccggcaaaatccacccgccctcgatcgtagttggtctcaaaacccgacgccggggaggccatcagcatcccgccgatcagcgccagctgaatgagtcgtttgctatttttatattgtgctgaatcacgcatacccgcctcccgaattaatcgtacgtcaggttaaagatcatgtgcgactccacctcaccggtactggtggtcggcgcatattgatagaaacgcgcatgcagaggcagggtgatgtatcgggtttcttgcgtgcgcagcgtaccgacgctgtatttcttgttgaattccagcggtacgccctctttcaggacctggataccaattcctttcgccaacgaggagccggatttttcgttcagcagcgcgcctcggctcaccgtggtgccggtggccagcgtgccggagaaagaggtctggatattggcgtatcccgactcgcttaacccgccgctgcactgcagctcaatattaaaatcctttccgcccgcggtggtgccgacgccgttgagatcgctgcgcttgatggtgccgacatcgacgttcatatttttgccgctcaggatggtacatgagggcgataccacggtgatggcgttggcgctcaggcgggtttcgaggatcgggttattgccgttctcccagtcgtaagaggtgtacttacctgccgccagggttccgctgccggtcacgctcgcggttttaatcacctccagcgtaaagcgggagccttccagcgagtaattcgtggtccggctgacgtagctggagaacgtgtcagggtagataatattgaccgtcgccccgccgcggctgaaccgcaggccgatcccgggcacgttggtggaataaattttatttcccagatcggtcgccccgggggcgacgattttggccacaaagcggttagtgccgctgctgcagctatagctggccccgcccggcgccgacatggtccagtcccgggacacgatcaccgagcctaccggcagatccggcggaaccaccacccggcccacaaccatgtcgaggctaaccgtcggctgcgacaggcgcgtacagtacgcccatgccgacgtggtccccatcgccattaagccaataaaaagcgtcagttttttcattagcgacatagcgtttcctttgttttttcctgacttaattccaccgagcactgtccgccgctccacttaaccgtggccttcggcgcgctggcgtcgctgataaacatcatgctgccctggcccaccacgccgatctctttcccggaggggttgtaaatcgtggcggcgaacggtagcggcagaccgtttgcctgacgcgcctgcagagtgacgttgttctgcagcgtggtatcgaaggagaccttgaccacgctcccttcccacggcaccacctgcgccacggtactgccgaaggcgacatcgtcgttgctgcctttcgggtcaatttcaacggaatttatccggtaaggccgcagatacggcagaatggcgtagccgtcgctgtcgatgcgggtacccggcgagccgggcaacatcgcgcccgcggcgtctttcgcttcgatcagcgccatggtggtgccgctttccggcgagaatacgacgccgtgctgatgcgcgatcagcgtcccgctggcgcctacgccgctctggcgatagccttcgccctggctatagctgccgttcagcgtggtccacggggtacggtagctgccgttcagcgccacatcgtgctggccgccggtagaggtcgtggtcgacacgccgtagttgaggttgttttcactatccagcgaaccgttgacgccaatctgcgaactggcgaagcgtgagttattaaacgcggtattcgacgtcaggttagccgtacggttttcaccgaaccacagcgggtagctaaagttgagtgacacgcgatcgtcgcgacggtggccggagctatccggggtatagacgcgctgggcgctgaccgaccacgagagccgaccgtacatgttgttgtaactaaactggtactgcttctccgttcccgaacggttccagtaatccgccacccggccgctcaggtaaaaaccgccccagccgtccggcaggttctggttgacggtaaaggtcatcccgtttttctggcgccacacggtgtagttgctgttgtagttcttctcccgatcgacggcgtagagggcgtcgttcaggttgtagtagcctttggtggagtagcgatacgccgccagcacgatgctggtctgggtttcggtaaacatgcggttaaaggtggcgcgatagctttgaccgtgctcgtcaagggtatcgctcttcagccgcgagtgagtcacgtcgaatgagagcgcgccgatgccggtattcatcccggtccccagcaggaacgcctgatagtcatcaaatccggtgacgccggtatagccggtaaacaggttatttaaaccatgctgccaggttccctggtagagcatcggtttattacgcagcgaactatcgtcgactttaccggcggagagcgcgtagcgggtcatccccggacgcagcagctgcgctaccgaggcgtaaggtacgctgaatacctcgaccgaaccatcggcctctttaaccgacacttcaaggtcgctaccgtagccggaaggatagacatcctgcagggtaaacggccccggcggcaccgtggtctggtagataatattgctgccctggcgcaccgtcaccagggcgttgctttgcgccacgccgcgaatttcaggggcgtaggagcgcatgccgtcggggaacatattgtcatcggtcgccaggttaaccccgcgcaggccgatggtgtcaaagaactcgccgttggtaaaaatctgcccgccgctgactatcgagttaatctgcggaatcggccgctgcaggtaggtctggttgctgttccagtgcgctttcccctgctgctgctgccagttcaggttaccgatatgcttgagcagccagccgtcccacgacaggcccgcgttaacgccaagatacgcgctgctgttatcggaaccgttggccgaggagatatggctgttccaggcgttggccatccagcctaaattcagcgccgcaacgcctttatcccagaactgcgggctgacaaagtttttcaggcgctgatcttcgtagatttgcggtacggcaatatccagtctcagggaggactgaatcagcgtgtctttgacgttatcttcgtgacgccactcctgcaggcgtccgcagaagccctctttttcgctgagctgcggatttaatttttccggcgaaatcccatactgcatcagcatcgctttggtatagcagacgcccattttgccgtctttaccggcggtgattttcaggtcgtagcgccctttccattcgccgttagtatagacatcaagggagtagacgccctcgctgatagcgctggtcgagaagcgcgacaggtcgaccttttcgcgactgccgacgataaaaccatcgttaaattgatagatcgttcccgggttttcctgtccgctggaaaatggcggaaagcagcacagcgcaaccgcaatagccgtgcttaatcttcccgggcagattgacctctgcttcatgatcgtttcccttatttgacggtaactttcactgcgacatctgcaccataatcattaatgttgttaacggtcagggtctcgcctttgctcaccgctgaagagagggcgatggtctggctggactgcggggcaaacatgaccgttttgctgttgagcgctttgccgccgttacgggagatacggcttacggtgatataaaagggcgttgggttactgacggacaggctgctgccgttagcggagagcgccagtttttctgccgcagcgtcgcgattgcctagcccggcagggcgataaataaacttaaagcgcgaacgaatcgccagctgcagaatattttgcccttcgtttttctggctggcctcaaccggcggtatttccagaaggttcagccaccacagcgtctctttatctttagccagccctgcattactgccgagcttaatacgcagggtttgaccgcttttcgcatcaacgcgggaaataggcggcgtgataataaagggggtcgtaatggtatccggcgtcgcgtcggcattaccgttatccagccaggcttgcgccagcgccggacggtcggcggtgttagagagctgcaccgttatttctttttcatttcctggataaataaagcgggtaccgttaacaataatattattggcatgggccgcaaaactaaaaatgaaacagaaaaaaagggcaatacgcttcatgctgacctcagaataaaaaaataagcgacagcagtggccgctttattattgttgtataccctgaataattcgaattgcagaaaggcggccagagagtgactggggtgagcaaacgtcgccaacgcctgtgccattcgaagtatgacgggtatagaccgccccggcgcgaggcggctttatctctcagtcgatattactgataagtaatttcgtaagtcgcgtagctgttaaccacaccggtggtaaccgtggtcggggtgctggtcgcgtagccgacgtagtaagtgaagcgcgcgccatcctgaacggcagaggcatcaccggccgctttaggctgggtgctgtcgcccgggatgattttgttggtcagcgcggtggcgttatcggtggagagaaccagctggatattctgcgcgccggcggcttcggtgttagccaggtagccctgctgtttagcggttgcgcccgccagcaggttaccgccggtccagttcacgcccagtttgctcacatcatcctgtttggtgccatcagccgcctggcagtcagaaacatcgatggtgaaagatttcggtttcagataggtatccgccgcggcagctttaacttccgttaaagtcactggtgacagataaacgttcgcatcgctgccctggccgtttacggaaacagtacaagatacgtcggtaactttaccgaagaaattaacctgaccgccgcctacattggtatcagcagcatttgccgcagccataccaaaaaacgcagttgccattgcagcagagagaagaacctttttcattgccatttccttgtcagagtgaattaagtatcaatgagcaaacagttaatacgcacaaaagtcagaagcgatttgcgatgctcacttttgcaactgttaatagaaacttcgactgaccggaagccgcaatatttaaggcgtcaggaacgaacccgataaaagaattcgtcaaggctgtcggcgtcaaagaatgctatttttcgctgacaaatatacatatgttcacgagctgttaatcaatgtaacagatagctcacaactattaattactggggattgatagcaagaaacaaagctattgttatttacactgaaggggaaaagacgatatggaattaacaagatagcaacctatagttgcataaaaggttatttctctacagagagaacaatcctaatccgtcagcagtctccctttttcgtcagttgaaaatgcagatacaacgcgcgccaccctgccggcgtaatcgtcacttcgcgaaatcccgcggtagtgctaaaccagccgttctccagaccgtgctgcagcagcgccgcgcccgccgcgcccccaagatgaaagcgtcgttcgctccagtccagacagccgcagcaggctttgcgccgggagccgcgcttcaccaccactcccagccgcgcaaagtgcgcttccccggcgagcgtcagcgccgttccgtcaggcgttatccacgcttcacgctgcagaaaatcatacagcgataccgccacttctccggccagatgatcgtaacaggtgcgcgccaggcgcaaattgaccggcgtgctggttgcgagcgccaccgcgcgcttgccggccatggtcatcatattctccagcaaaccggcgacatcactaccggcgaggcggtagtagcgatgccggccctgggcaaggcagattaataaaccgctgttgaccaggcggctaagatgcgcgctggcggtcgaaggggaaatatcggcgacggcagaaagctcggtcgccgtccacgcccggccgtccattaaggcgcacagtatcttcaggcgcgaggcatccgccatcgccgacgccactgccgccatcgcttcggccagggactcatcgtcttcaattagctcaacaggttttaacatagtgcctcgcttattttccctaaccacaaacagcagccagagtaccggggatgggcaggttaagcacgatattcgcgcagcacctgagctacccgaatgtgataacaagcgaaaatgctctcccgcccctctttctgcgcagcctgatggcaaaggttgcgtttccacgcctgcaccgcttcctcatcccgccaccaggagagcgacaaaattttccccggtgtggtcaggctttggaaacgctcaatggcaataaaaccgtcaatattgttcagcagcggcttcagctccgccgccagcgctaagtatcgttcctgactcgccggagtgacctcggcttcaaagagtacggcaatcatcccattgtcctcacgcaatctgtgtgagggtcactgtatcttttcaccctggctcaatgcttcgttgacgggcgaaatatcgccgctttacttgctcaaaaaacagccaatgcattcacattaaaaataattaatcacgcgaggcgagaaaactgcgcggctgttgagatcgttttccacggcgaaagagacgctgcagaataaatcatctgtttgtttttattagaaataaaaattaaaatttaggcattcgtcatcataccgtcacaaaagtgtgatctaaatcgcactttttgcaactcgcgttatagttagcaggcttattataagtccatcgaaagcaacaacgctttccaccataaaagttaaaaggacaaacaccatgaaaaacgtaaaattacttgccgctgccggtatgctgtctctggtctctttcgctagcttcgctcagcctgttagcgtaaccgctgatacgctggacaacgccgaagccaaaatcgccgccattgctaaagaccagggccagtcttatcacattaccgaagcgtataccggtaaccaggttcatatgaccgccgagctgtctaaataaccgaatggttgcagagggagctgccggacaggtcgcctgacggcggctggtctggctcccgccacataataagcacacagcaatgtcgagccccttgatggggctttttttgtttctggcgaaccgtgaacccactgcccgggctacgggttcactgccgtctgcggtgccgtagcccggacagatgcgcagcatcgcctccgggaaattcagccactctgcgcgctgctcccgggggcggcgcttaatgcgccttgcccgggctacaggttaacagccgtctgcgggccggtagcaccgacagatgcgtcagcatcgcctccgggaaattcagccactctgcgcgctgctcccgggggcggcgcttaacgcgccttgcccgggctacaggttaacagccgtctgcgatccggtagcccggacagatgcgccagcatagcctccgggatgttatcggcccgctacggcgctcttattcgataacgcacgctgaatcgacagcacgctgaacagcacaatcaccagccccaccagcgccagcccctcgatcttttgcccgaggaaaacccagcctaatagcaccgccgtcaccggactcagcaggctcatcgccgacaccgccaccggggaaaggcggctgataccgcgaaaccacaggccgtatgccagcatcgccccggcaacgcacagccacagatagcccgccgcctgagtcagcgtcacctgatgcagaggcggatcgaccagtaacgcaatcggtgccagtacgataccgccaaccagcagctgccagccggtcagcgcgataaccggcaaagcgatcgcccagcgacgcgacagccaggttcccagcgccatgctcatcgcccccagaaacgccgcggcgatccccagcggttcgagcgtggtttgcggcgacagcagcagcatcgccattcccgcgatccccatcaatgccgagagcaccgccagccagggcgatcgctgacgatcgacgcaccaggtcaacagcatcaccagcagcggctggatagcgccaatcaccgccgccaggccgcccggcagccgataggcggcaataaacagcagcgcctgaaacgcgccgatattcaggatcccggtaacgatcagcttccaccactcggcgcgcagcgggaaacggcgactccagatcaacagagcgatcccggccggcagcacccgcagcagcgcggcgataaacggacgatccggcggcagaaactgcgaggtcacaatataggtgctaccccagatggcgggggccagcgcggttaaaaacagatcaaccatcaaattgcgcgaaacaaaggccatgattttatcttcacatcaaggtaaattgtggcctaagtatgtatcgatatttatcttgatatcaagacaagtgagcattaatggacaaatcaccgcagaccgacgccgtggatcgcattcttgaacagtggaaacgggaacgccccgatctcgattgcagtccgatggggccatttggccgcctgaaacgctgcgcgctgctgctggagccgcgcattgaagcggcttttcttcgtcatgatttagtgcgctgggagtttgatatgctggcgactttgcggcgggcgggcgagccgttcgtgctgtcgcccacccagctcttttcaacgttaatgatcacctccggcaccatgacccatcgtctgaaggctctggaaaaacgggggtttattcgccgtctgccaaacccggacgatgcgcgcagcatgctggtcgcgctgacgccagaggggcgagagttaatcgacagggcggtggaaagtcacgtggcgaatgagcgggagctgctaagtgggctctccgcggcgcagcgccagcagctcgatgaagcgctgacggtttttatgcgcctgctggaaaaagagtaatacccacccgctttgaataaggcgcttaccttgttgctggatggcggttgacgaagcaccaccgttatttcccggaggcgatgcttgcgcatctgtccgggctaccggcccgcagacggcggtgaacccgtagccccggtaaggcgcgtcaagcgccgcccccgggagccgggcgcagagtagctgaatttcccggaggcgatgccgcgcatctgttcgtgctaccggcccgcagacggcggtgaacccgtagccccggtaaggcgttagccgcgaccggggagctgagcgcagagtggcataatcaccccttaccgagcggaaacgggcgatcctgcacaaccgttttcatcaccagcgtcgaccgcaggtgctgcacgccgggcattgccgagagtttgtcatcatacagcttctggaacgccgggagatcgcgggttaccacgtgcatcaggtagtccggatcgccaaacaggcgctgcgccagcacgatttgcggtatctcttccaccgcctcctcaaacgcgcttaccgctttcttatcgccctcttttagcgtcgcgaagacgatcgccaaaaagttaaagcccattttggccggatccagattggcccgatagccggtaatcacgccttcctgctccagcgtccgcagccgtcgatgacagggcgaaaggctaagattcacccgctcggccagctcggttatcgacagccgcccgtcagcctgtagctcagcaagaatttttcgatcgatgctatccatttagaagattttccctcagaagaacgccttaaagcataacattaaaagctcattgcgcaataaactcgatattctttccctcaaacaaccgccgcttaacgagggaaaatgatggaaaattgttgtcagcacgcagaggcgggccgtccatggaaatgagctttatcgccagcttttggctggtctcctttctgctgatcatcacgccgggcgctgactgggcctataccatcagcgcggggatcaacggacggcgcgtgatacccgccgtcgccgggctcatgtctggccacctgctggccacgctgatcgtcgtcgccggaatcggcgtgttaatcgccaatcatccgctggcgctgtcgacgctcacgctgctgggcgcaggctatctgatgtggctggggatcgctattttgcgccatccgccaacgccaggtgcacagcagcacagcgcgggcagctggaatcgctgggcgattaaggggttatgcattagcggcctgaatccaaaagtctttcttctgtttctggccctgctgccgcagtttaccgacccacggggaagctggtcgctagcccagcagatgtcggcgctaggcggtattcatctggtaacctgcacgctggtctatttacttgtcggctacggcgccaaagcgctgttagcgacccggccccaaatcgcgcaaaaggtcagcatcgcttccggggtgataatggtcgccatagccgccctgctgtttctggagcagctgaggtagggggcggggaacgttcgcaatttaacggctatccgttcaggcagcgactcagtggcattaaattcaccgttgccttattaaacgtggttgcgccagcatgctggcgcatttattcaggcgcgaatatcgtcgtactcgcgagtattatcaaattcatgtttggcaaacgggcacagcggaataattttacgctgctcaccgcgcattttttccaccactttcgccaccagcttttttcccaccccctggcctttcaggctggggtcgacgtcggtgtgttcaataatgctgaggtgctcgcccgtgggcacaaaaacaatttccgccacctgcttcccgtcggcgtcattgacgtaaaacttgttatgaccttccagtatttccatcatttcctcgcttatttttggcgatactttagtgcgccgctcgggcaggtatcaataaccttaaccaccgtggccacgtccacttcatccgggacgatccacggtttgcgtttcaggttgaaaagcttcgcgctaccgcgcacgcagttacccgagtgctgacagatatcggtgttaaagtagacgtcgattttctcgccggtataggcgcgatagcccgcttccagtagttctttatccatgacattgcctcagtcctgactattttttagctttggctctaagcatagccctgccaacaaccgctgactatcggcgacgggcgaaatttatattccagcggcctcacgccattaatgcagaatgaatgattttctatgcactcgttatccaaagaaaatgttctgtttatcgatgaaatacagacgcttcggttatatctatcttttatttccccggtagggagattacactcatttcaccttaacccgagcactcaggtattcagtcttgaatcgcattgtaaagctgccgcgccctacgctcttattcttgctatttacgctctccggctgctcattatccccggcgattccggtattaggcgccgcattcccgggctggtttttctgcttaacaggcgccgcgctgttacttattccctgccatatcctgattgtgcgtaaaggatggcagtcgcgattttctccgctggtcttcagctatctggcgctgatgttcctgttcgccacgattctgtggttcctgctcttcgtaaactagatacctatgacctcatcccgctcaagcgttatccgcaaaaaatggcccctgctggcgctcgttctcgccgctatcgtggcgctgattctggttatctggcagctgcaaacctcgccggaaaccaacgatgcctatgtctatgccgacaccatcgacgtggtgccggaagtgagcgggcggatagtcgagatgccgattcgcgacaatcagcgggtaaaaaaaggcgacctgctgttccgcatcgacccgcgcccctaccaggcgatgcttgatgatgccaaagcgcggctgaccacgcttgatgcgcagattatgctgacccagcgcacgattaaagcgcaggaatataacgcgcagtcggtcagcgccgccgttgaacgggctaaggcgctggttaagcagaccacctcttcacgcattcgccttgagccgctggtaccgcaagggtttgcctcccaggaggatcttgatcaggcgcgaacggcagaaaaagcggcgcgcgccgagctggaagccaccctgctgcaggccaaacaggcttccgccgccgtgaccggcgtcgatgccatggtggcgcagcgggcgggcatcctcgcgcaaattgcgctggccgagctgcacctcgaatttaccgaagtccgcgcgccgtttaacggcgtggtggtggcgctgaaaaccacgatcggccagtacgcctcggccctgaagccggtctttaccctgcttgatgacgaccactggtacgtggtggcgaacttccgcgaaaccgatttaaaaaacgtgcggcccggcgttccggccagaatcaccgtgatgaccaaccacagtcgcgccttcgagggcgtagtcgactcggtcggcaccggcgttctgcccgacggcggcagcgtgattgaaggcctgccggtgatccagaagagtatcaactgggtccacgtctcccagcgcttcccggtcaaaatcgccgttaaagaccccgacccgaacctgtttcgtatgggcgcctccgccagcgccgttctgcagccgcaataaggagacggcatgcagagcttgtggccctttctgacccgggaactccgcgatgcgccggggcgggcgaactacaccctgcgcctgacgctcagctgcgcggtgctgattgtgctgtttatgacgctgcatattcccttcctcgccgtcgcgctgatcgtggtgttttacgtcagccagccgaacgtcctgatgatcaaactggtaagcgtggttttcgtggtgaccgtcagcgtcgcgctgggcggcgtgctgctgattatcaaatggacctatgactatccgctgatccgcctggtcgcctcggtgatcctgttcttctgcgccatttacctgatgcgggtgctcggcaagctcgggctggcgtttttcgtggtggcgctggcggtcatctacgcccagaccttcccgtcgatgaccagccagagcgaaattctggtgcgcctgctgctgtggctatgggtggcgatcaacaccgcgattctggtgaccctgctggtcaacgcctgtttccagcaggcctttcccggctatcagtttaaagcccggctggtggtgatgctccgccagacggcgcggcgcctgagccagccggacgatggcacgccgccgcccaccgttaccgagattgccgggcagtttaaccaactgcggtccctgtatcagcaggccgcacgcgccacgccggagattgccgccagcccgcaggcctggcagtcgctgatggccgccgcgctgagctgctctcatttgacggcgctgctcctgccgggcgacgaccatcccgatgcgcgtcggcggatagccagccagcttaacgcgctggcggataatctgcccgcggcggcggaggtccagccgctgattgtcccgcgcgacggcgccaacagcgccattttgcaggagatcgccgaggttctggcgcggctggcgcgcggcgaaaccatcccgctgccgcagggcgaagtggaaaaagcgccgctgcttttgccggacgcgtggtccaatccggcctatctgcactttgccctgaaaacgctgctggcgacgctgctgtgctacgttttttacaccgccgccgactggcagggcatccacaccatcatgctgagctgcgtgatcgtcgcccagccgggcctgggcgccaccatgcagaaaacgtggctacgcatcggcggcgcgctgctggccacgctgattgcgctgcttctgatcgtctttgtgcagccctggaccgattcgctgagcggcctgctggcgatgaccctgccggtcttcgcgctggcggcgtggattgcggcgggatcggagcgcatcgcctacgccggcattcagataggctttaccttcgcgctggcgttcctgagctggtttggtccgctcagcaaccttaccgagctgcgcgaccgggttatcggcatcctgctcggcgtgctggtttcctccattgttcatctctatttatggcccgatagcgaagcgccgcagctgaaagcgcgtctggcccagctgtatcgccagctggcgcaaaccctcgccgcccgcgacgatgaagttcagcaggtaccgctgtttgccgcgctgaccgagagcgaaaccttaatcaaccgggtggccgccgagccgctgggaacctatgcgcacccgtggccggaagccaaaagctggccggcgcgggcaacctttcgtcaggcagaggagatcctgcgcctcagcgaaggctatcgcctctacgccgcgccggaagatacttttttagcccgctgcgcccggcggcttgaagcctacgccagcgatatcgatgcgcagcaaaataccgttgagcgcgttcaggcgccgcagccggatccggcgaatccgttcggcgcgccgctggtcaatgcgctggccgcgctgcccacgtggccgcttgcgtcttccgttattccgcgacaggcaacccgatcatgacgaaaaccactcctcttccgcgcgtctggcgctccctggcgcttgccttcgccctcacgcaattagccggctgcgcgttaattcaggacgatcctggccaggtaccgctggtcaacccgcagcaggccgagctggcgaaggtgatccacctggcgaacagcggctggccgacggcgcggtggtgggaaagctatcaggatccccagctcaatatgctggttaatcgcgcgctgcagaactctcctactatgcaggcggcgcggctgcgtatttcgcaatcgcagtccacggttgagctggcgcagtcggcaatgggcattcaggccaccgccgtggcggcgcaaaaccgcctgcgggtgaccaataaacagtttacctggccctactccttctccctgccggtggataaaaacggcccctggtacacgctgaatacggtcggcgtcggagcgacgctgaatatcgatttatggggcgccgaccgcgcccgcgtcgccgccgcgattggcgaaaagaatgcccgccaggcggagaccgccggtatcgagctggatctcgccagcagcgtggctcagctctatttcgcgatgcaggcaacttttcagaaaatcgaattactcaaccagctggaggctatcgcccgcctctcggtgcaggcgcacgagcatcgtaccgcgcgcggcgtcgaggatagcgtcgatgtcgccaatgcccaggcggagctgctggcggcgcagcagcaggtgattacggcgcaggggacgctgacgcagtaccgggaaaccctgcgggcgctgatcggcgccgatgcgcatagcatgccggagattcaccccgtggcgctgccgacgctgcaggaaacgctcccggactcgctctcgtttgagctgctggcccgccgcccggacctgcaggcgctgcgcggctacgttagcgcttccatgagccaggtggacgcggcaaaagcggccttttacccgcactttgatatcaaggccttctggggctacaacgcgctgagcgtcggcgatctgtttaagtcctcattccagcagatcaatatactgccggggctctatttaccgctgtttgacggcgggcgcttaaacgccaacctgaaatcgacgcgtacggcgagcaatattttgattaagcagtacaaccaggcggtgctggacgcggtgcgcgacgtggcgattagctcgagccagctgaacgatttgaaccagcaggccgccctgcagcagcagaaagtgacggcggcgatggtgaccacccgcagcgccagcgcgcaccatcagcgcgggctggtcagctactatgcggcgcaggaggcgcgtcgcccggccatcgcgcagcagcttttgctgctggatatccaggcccagcggctcagtaccgatatcaccttgattaaagcgctgggcggcgattatcgcggcccggcgcagagcgagaacgccccatcgcgctagcttaacaggcgccattcgcgcgcctggtttaccgcctggatgcgccccttcacctgcagcttttcatacagctgcttaaggtgccatttgacggtttccgccgaaatgcccagctcgcgcgcgacgcccttgttggaatggccgctggcaatcaaacgcagggtctgctgctcccgttcagtcaggcgcagcgcgggcggctgcggacgcgccgtatcaatcacgatcccggcggcggcgaagcgggacagcaaagcgacgatatcggcggtcagcgcatcatccgccgcgccgcgcttgtgcatctccgccagcagcgcagccatctcttccctcccctccagcaggctgcgccacagcccctgacgcagcgcgcgcgcaagcgccggtcggcagacagccatcgcctgctcccgctcgccggcacgccagagggcaagcgcctgtttgagccgcaaacgcacggcgaacagccactcgccgctggtttcccgcacgccggccagcgtatccaacagccgggcggcggcctgcggttcgccggcggcgataaggagacggctctggctgagcgcgatatatccgccggcagcctccgtctggctaagggtctgcaggcgaagcagcagcgcgtcggcggccagtttgtcgcccgcgtgaagggcaacggcaatccgctccgccagcagcggagcctgcgcccgcagccagccgcgctgggccgccagcccttcggcatgcagtaatagtgattcggcttccgccagtctccccatttcacgggcctgacgggccaggatgatatagccgcggctaaggccgtcgggcggacagaagttgtcgatggtctccagacgcggaaccagcaggctttgcgcctgctcgcccttcccctgctcccaggcgatctcggcgagaatgggcgccagggtagcgccgctgctggcgttctcgccggtatgctgctccgcatagcgcagcgcccccgcggcctgacgttccgcttcggcgagattcccctggcgcaaatagctctgcgccatgacaaaggcccggtagaccgtcacgaacaggttgcggttagcaacgctgacgccggatacccgctgctgcacctccagcgcctgctgcggccgggagtccgccagatggcagtagctgaggatgttgcacaccaggccatcaacccagatatcgccgcagggcacctcgcgcagcagcggttcgacaatagcgatactgcgggcaatattgtcggcaaaggcttcgcagatcgcgcgaacgacccgcagcttcacccacgagctgtgggccagcgccccgccatgcgccgccgattgcgtctcaatggcgtcgagcagctggcgagcgtcgctaaaccggaagcggtgggctaacgcccaggccagattaagctgaagctcgatgcgcgacgggtcgagattggctggcaggtagcgtatccactgcaccagggtatcgatatccccctcctccgccagagactgcgcgcccgcttccgcatccctggccgccgattttccggcggccagcgcatggcgtatcgcctcggcccacagctgctgcgaggcgaaccaggcgctggcgcgatcgtgcagctggcgaatatcaatatccccgccgtggcgcaggcgatgcagcagcgcgtcgcgcatcagcgggtgatagcgaaaccagcggccgctgtcgtccagcgcggaaagaaacagattgtgctgcgctatccacctcagcatctcgccgccgttatggcggccgcagacggcatcgcacagatccggatgcaggcgattaagcacggaggtatgcagcaggaagtcgaatacttcgggcggcagcggcgcgaaaatcacttcatccagatagcgggagattgaccgcgagccggcgccgaggcccatcgccgtagacgcgtccggggagagcgcggccattttcattcccgcgacccacccttgtgtgagcgcgataagccgggggatcgcctgcggatccagccccgacgcgccagcgaaataagcgcgggcttcgctggggttaaagcgcagctccggatcatagacctccagcagctggtcctgcatatgcagacggctcagggctaaaggcgcctgactacggctaccgataagcagatgcagcgccggcggcgcatggtgcagcagccagctcattccctgatgaatcgccgggtcgctgatgcactgatagtcgtcgaggatcaggtacagcgggtgcgggcactgattaagctgattaacgagctcagcaaagaacagggggagctcggccggaagctcaccttgtaacagatgcagaaacgacgggctccacccctgccacagcggccgcagcgcctcctgtagatagcgcataaacagcagcggcgcgttgtcgtcctcttcaaggctcagccaggccagcgcatccccttgtcgaaggcggtgccggtaccactgcgccagcagggtggttttgccaaacccggcgggcgcgcgcagcagggttaaacggcgggagacggcgccgtcgaggcgctgcagcaggcgctcccgcgacagcaggctttccggcgtacggggcggcgtaaagcgcgtggaaataagcggcagcgtcccggtgaaacgtaaaggttcctgatgaacaaacgctgtcagtgaatcatccgccgagggtaaaaaagccataccgcgattactccttaaatccagtccgtacgctcattatcccccccatcaggggggtaggccacgcttattgcgcccgatagagtagtgccattcgccgcagcggctacgacgacatcggccgcgggcctccctggtttattaatcagtacaaggtgagtacagacatggctatcgaaaataaagttgcgctggtgaccggcgccggtcagggcattggtcgcggtatcgcgttgcgtctggctaaagacggcgcgtcgctgatgctggtcgacgtgaacccggaagggattgccgccgtcgccgccgaagtggaagcgctggggcgcaaagcggccaccttcgtcgctaacatcgccgaccgcgcgcaggtgtacgccgccattgatgaagcggaaaaacagctcggcggctttgatattatcgtgaacaacgccgggattgcccaggttcaggcgctggccgatgtgacgcctgaagaagtggaccgcatcatgcgcatcaacgttcagggaaccctgtggggcattcaggcggcggcgaaaaaattcatcgatcgtcagcagaaagggaaaatcatcaacgcctgctctatcgccggtcatgatggtttcgcgctgctgggcgtctattccgccaccaaatttgccgtacgcgccctgacgcaggcagcggcgaaagagtacgccagccgcggcatcacggttaacgcctactgtccggggattgtgggaaccggaatgtggaccgagatcgataagcgcttcgccgacattaccggtgcgccggtgggcgaaacctataaaaaatacgtggaaggtatcgcccttggccgcgccgaaacgccggacgatgtggcaagcctggtctcttatctggcaggcccggactccgattatgttaccggtcagtcgattctgatcgatggcggtattgtttaccgttaagggataaacccggcgcagaacgcgccgggtttttgcgggattacgcgttagccgcgggctcctgcggcttgtcgctgcgggtgttttccagcatccggcgaaccggaacaatcagcaggcacagcaccgcggcgcagatcagcagcgcaatggagcagcgtgcgaacaggtcaggcagcatatccagctgatcggccttcacgtggccgccaatcaggcccgccgccaggttacccagggcgctggcgcagaaccacagccccatcatctggccgcgcattctttccggcgccagcagggtcatggtcgccaggccaatcgggctaaggcacagctcccccagcgtcagcatcagaatactgcccaccagccacatcggcgaaacgcccgcgccgttgttgctcaggacgttttgcgccgccagcatcatcaggccaaagcccgccgccgcgcataaaataccgataacaaacttagtgatgctgctcggacggacgtttttgcgcgccagcgcaggccatgcccagctgaataccggcgccagcaaaataataaacagggcgttgatcgactggaaccacaccgccgggatctcgaaggagccgagcatacggttggtatagtcgttagcgaacaggttaaacgaggtcggtttctgctcaaacgccgaccagaaaaaagcggcggagatgagcaggataaagcataccagcaggcgggcgcgctctttgcggctcagtccggcgaagacgaacaggtagataaaatagagcaccaccgacgccgcaatcacgtagaccagcacgctggcgaccgccaccgggttaatcacgataacgccctgggcaatcaacgcgatgataaccgccacgccgaccgtcagcgccagcagccatgcgccgacgccgtttcgtttcactaccgggctgttccaggtggagtcgaggccgacttcgctgtcgtagcgtttcatcgccggaacggcaaagacgcggaagataatcagcgccaccagcatcccgataccgccgatgccgaagccccagtgccagccgtgagatttaatcagccagccggagatcagcggggcgataaacgaccccatgttgatgcccatatagaacagcgagaagccgccgtcgcggcgcgcatcgcctttcttgtacagcgtaccgaccatcaccgaaatacaggttttgaacaggccggaaccgagcacgataaacatcaggccgataaagaacaggctatcccccatcaccgccgacagcgcgatggagagatggccgagggcgatcagaatcgagccgtaccagaccgccttttgttgcccgagccagttatccgccagccagccgccgggcagcgcggcaagatacatggtcccggcaaagatcccgacaatggccgacgcgttctcgcgcgccagccccatcccgccgtcatagacggtggccgccataaacaggatcagtaatggtcgaataccgtaaaacgagaaccgttcccacatttcggtgaaaaacagcgaaccgagggggtaaggatgaccaaaaaaggtccgagtttcatttttattaacagaggaatgcataacttctcccaaagatgtccgcagcgctttaacgcagcggaaagcgtgttggccttttatacacaaggccaatcattcacatttaatgtgacgtaatttaaccatttgataacctaataatggtcctgtctagtcccttcccccaactttttagatgaaaagtcgacaaacgtctacttttacagatttaaagttggcgagagaggaaatgtgattgacagaggcattcatgacaaaaatgatactttttcatttatttacagtgagttaagaaatcaccctggcaacttcatcccgccagaaaccccgggcgataaaaggggtaaaagcgggaaaaaacagcattaatgggggctttattgagtaatgccgtttaatgacattctcaacgactcaaaccagggggaactcgcggcagggaatattccaacctgcagccggaagaacgatcgaagcgagcatcccggctcattggcccattgacggagaggagatatctacagatagcggatcaaaaagacgataagctcctcaatcagctgtggcttcatgactctaaaaatatacttaaactttttatgcgatatttttacaatgcgccatttcgcttttgatgccgtcagccgcagggtgagcctgactttcagcgacaggctttcttcagatacaataatccgcactttatttcttgcgtagtcatatttgaaactaatatcaaaaaagaaaccatcgtttgccacggtgatttttttggcatcgccaaaagaacccttggtaactttattatcaggatttgcttttagatgtgacaatattgagacatataagcacacgaattttattttaaactcacgccgctgtcgctttattttctccttttccttccttaatctttccaggctatttgtcatcgaactcatttattcttcctgccatatgatttatatcctatataatcaccagcgaggtttttaagacaggatagcatcacgataattctccatgcgaataatcagacaacgcctcagaatgttatttctgtagcgttcggtagtatccgctcattatggcttgcataatgacaatatataaaatatggtttttactgtcataacgcgattctgacataaagattgaaataaaatccactttttatttcattggacatgtttttcagaagtttcgcgttacattttaaatgtgcgggtactaagaattatattagctacgcgcataatgtattgaaaaattttaaaaatgagggaaaccagcgacccgtttgttcgttgacggataagccgatgatccctaatggcatagaggaacgtttgaggggctatacccttcaggggggtatctttcctgtacgccactatcaacgacgctttaatccagcgcgctttaattgcgctatattcgggagaagccgtcactttctccagcgccgggttgatacgcggcgcaataccgagccctttaccgtagtactccggatcggtgcgccgctgccggaacagaacgctagaggtgcgcctcttcatccagggagatcacctgaatgccggcattacgatacgcctgaacgtcatcgggcagacgatcgaccaccacggtatcaatacgatccgcggcggtaaactgggcaagcgaggtattattcagtttgctgtagtcgcagacgataatcacctggctggcgtgttcaaccatgccgcgtttcgtttctgccagcatgatatcggccacgcaggcgccgtgtttcagcgacagcgaattggcgcccataaacgctttatcgacgttcagggtatcaagaatggagcgtccgttgatcgccaccacgcagtggtatcccttcttcacgatcccgcccagcagaatggtttgaatagaggggctggcttccagctcgcgggcgatttggtaatcgttggtgaccaccgtgacgttttgtcggtcgcgaatattgcgcgcgatatgcagggtcgtcgtgccggtatccagcacgataatgtcgccatcctcaaccagcgccgccgcgcgctggccgatccgctctttcgcgctgaggttgacaatttcacgcgcatccgacgcctgttcaaagctcgcccgcgtgcgaagaacggcgccgccgtgggtacgggtcagcagtccctcctcttccagctggcggagatcggcacgaatggtggcgccagatacattaaagacgtcacacatctcagaaacagccactttgcgtttttccctgagaatactgagcaacttctcctgtctttcttctgcaaacattctgcctctctcttatttacggcacgttacgcgcgacgcggcgctggcttaccgttgcttatcagtcgggtcctgcgctcagggcatccagcctgtcgtataaggcggcggattgccggtagagcgtatcaaaaagctcgctgcaggcgtggtaataatcccgcagacggggatccggcgaaatcagcttatcgaactgcaccgtctgcctcacgccgctggcaaaatccgcgtacaaccccgcgccaaccccggcgataataccgcatccggtgacgccattctcctgattgcgcgtagataatatcggaagattgtacgccgcggctttgatttcaagccacagcgggctgcgcgcgccgccgccggaagcgatcatttgttgcggatattgcccgcacgcctgcagctggcgcagattgcgccaggacgcaaaggccaccccttccaggaccgcgcggaataaatgaccgcggcgatgcttgcgctgcaggccgaagaactgcgcccgcgagttcgtgtgttcggccagacgctctcccgtcagatagggaagaaagagcagcccttccgcaccggccggcaccgccgcagcttcctgcaaaagctgcgggtgggtaatctggttatcggcaagcgccagccgcgcccagcggacggcatcgccgccggcgtcgagaatcgtaaatccgccccaggccgcgttagccagatgaaggttattgaccagcgggtggcgtaacggccgcggcgacactacggtgatcagcgtcgacgtgccggtggagtcggacgccatccccggctcatatactcccgagcccagcagagaggccgccatgtccgacgtaccggcaaccaccgggatccctggcggcaggcccgtcaggccggcggcgcgtggggttacctggccgataatgtcgctggaaagtttgaggtccggtagctgatcgacccgcaggccaaacgtttcgcaggcttgcgaagaccaggcgcgggtttcgctgtccatcaggaaatagcaggacgcctcgctatagtcggtcgccagggcgccggtcagcatgaaattaatatagtccttcggcatcaacaccttggcgagctttggccagcgctccggatgatgttcacgccaccaggctaatttgaaagcgggccaggccgccgcgggcggattatttaaatgcgccagccacgtttcccgcccttcgcgcgcggtaaaagcttccacctgcggctggctgcgcttgtcattccacagcagcgccctgtcctccaccagctcgccgcgatcgtccagcaggacggtgccgtgcatctgcccgcaggcgccaataaccgcaatctgcgcagccgtttcaggatagcggtaaagcacctcgcgtatgcagtcgcaggcggcctgccaccataaagacggggcctgttctgaccaacccgcacgcggcgtggtctgttcatactctctttgcgcaaagccgaccatcgtgccgtcaacgcgcaaaagagcggcgcgggtactgccagtgccaacatcaatcgtgagtattttatctttcatcactgactccggtgacgtcttaaggcgggccatcaggcccgcggtctctcagtttaatcggcgttcagctcgggaaagcgttccgggtgctgctccagttcagccagcacctttgtgaccgcgccatggctcatgccaaagcggcggacgccaagctggtacagggcgcgcaccgttgccagatcgcgaatccccccggcgcctttgatatcgattcgccctttaagctggtcggcaataatgctgactttttccaccgtcgcgccggtcggcgcccagccggtggaggttttgacccacttcatccccacctctacggcgatatcgcacacgcggcggatctgctcctcattgagatagtgcgtttcgaggatcaccttcgccggtaccggcgcggcggcgtccaccacgcggcgcaaatcttcgcgcacatagtcataatcgccggataacactttgccgatattcaccaccatatccacttcgcgggcgccatcggcaatcagctgccgcacttcctgaaccttggtgtcagtcgcatgcccgccgccgggaaagccgaccggcccgccaatcatcacctctcccgtcccctgctgcggcagcaacgtactgagaaaacgcgtccagcagggcagaacgtggacggaaataatgttgtatcgggctgccagctcggcgcaggcgcgaacgtccgcttcggtactggtggcctggactgcgctcaggtcgactaaacgtgcaaaacgtcgggttgtttcattcatggttttatcctgctctttgtttttagttgctttcatttaatgctcttaatcggcttaaatccatttaaaaacgcaccaaatgaaaataacgtgatcaaattagcatttttttatttcatttgcttttaattagcagatgggaaatgagcgatgcccttgatgaacgggcgtaaacgggcataaacgggcgcaaaggcaatattgcatttatttttgtttgtttttgtttatgcctgaataaagggcgagagagcgaaaccgctgccggatatgacgccaaaatgcgtacgctgtcacattgaccggcgacaaaacggtcgccttcgccggatattccggaggtctcaacgccctacgcaagggaaaggtaatctgattatgtacttcaggagaaagctatgttgccgctggaacgtcatcgtttgattgttgaactgctgggccaacgcggcgtgatgcgggtgaatgagattgcgcaagcgactcgggtctccagggaaacgattcgccgcgatctgagcgagctggaacggaaagggattttaaatcggagccatggcggagcgctggcggcggagaacccgctgccggcgatccgagcggcgtcgcccgccctgccggtcgaagatagccagggaagctttcagcagagaacgctgctgcacagcgaaggaaaaatgcgcgttgcccgcaaagcgctgcagtgtctccagccgggacagaccatcgtcctggacggcagcagcaccagctggtttttggcccggcagatgccggagatgacgctaacggttatcacgccctctatccgcatcttgcaaacgctgatgagcagacgctcgttgcatctcgtgggactggggggcgatttttccccgaccgaggaggcattcttcggtgaaaccgcctcacgaacgctgcgcgagtacgccgtcgatacgctctttttctcctgccaggggctggagcgcgatagcggtttatatgcgggtacggaagcccacgccgccctgttgaaacagatgatgctggccgcccgtcagaccgtggcattggtcgacggcagcaagctggggcgaacaggcgtcgcgcggatcggcggattgggcgagctggactgtttaatcaccgaaaagtttgtcgatccgctgctggaaaaagagatgacctggcataacgtcgggctacagatcgcctgagtacgccgtcatgacgtgacggtgactacgcgcattgtcgaaacgctgcttcccgcggcagggccagactttgcctgaaatcagccactaccggaataaaagaggccttatgcgttattacctttctccttcgctcatgtgtatggacatgatgaagctggcggaacagctgcactttttaaacggcaaagccgacaggctgcacgtcgacgtgatggacgggcactatgtgaaaaacctggcgctatcggccagctttgtggcgcagattcggccctatacgccgcttcccatcgatgtccacctgatggtcgaagagcccaccccgtttatcccggcgctgatagaagccggagcagacgccatttccctgcatccggaaaccatctgccgcgaagcttttcgggtcatcaatatgcttcgccaggcggggaaagaggtggggatggtgctcaatcccgccacgccggttgagagcatccagcactatctgcatctgctcgataaggtcacggtgatgaccgtcgatccgggctatgccggtcagccgtttattcccgaaatgaccgccaaaatcgcgcagcttcatcagctaaaagagagccgcagcctcaacttcttgctggaagtcgacggctcatgcaaccgcaacacctaccgtgagctgctgggagccggggcgcaggtattggtgatgggcagcagcggtttattccgcccggatatgccgctcgagcaggcctgggaaaaaatgtcccgcgatctgtccgccgcgctgcactcccccgagcacgtataaaggagcgaatgatgtcaggaaaagtctgtgtttttggttcattcaatttcgacatggtggccagagtggagcgctttccggtgccgggcgagtcgttagtggcctgcgggagcatgaccagcgccggcggaaaaggggcgaaccaggccaccgccgcgctaaaagcgggggcgaatgttcactatatcggcaagattggcaatgataccttcggccattttgcccgtcgtcatctgaagggcgtggggtttaacgccgtgacgctgctggtcgccgaagaggtccccaccggcaatgcgctgatttatgtggccggcaacgatgccgaaaacatgattgccgtcgaccccggcgcgaatatgacggtgaccgatgatgaaatcgccggctgcattcccgctatcggctgcgcggatgtggtgctggttcagctggagaataatctttccgccattgaacaggtcgttgacgccgcgaaagcagccggggccttcgtggtgctcaatcccgctccctggcagcccgttgagcacgcctttctaagcaaagtggatctgcttacgccgaacgccacggaggccgggttaatgaccgggcgccgggtcgactctctggcggccgcggccgaggccgccgatgcgctgcatgctcagggcgcgcgcaacgtcattatcaccctcggcgcaaagggcgccctgctgagcgagcagggcgtgaaatcccctattccatgctttccttctcatccccgcgataccaccggcgcgggcgatgcctttaacggcgcgctggcggcgcgtctggcctgcggcgagccgctgcatagcgcggcccgatttgcggcggcctacgccgccgtcagcgtcgaaaagcagggcgcatcatctttaccggattaccaggaggcacgagaacggcttttacgtgccgcctctgattatgaaatggcttaaaccctactgtataaaaaccattaagaggatagctcaatgagtacgctaatcacggataaggtcgataaagcggcggtccacaatgaaaaactggacgccagcgcgtatttaccgcacaccccctggctgcaatttttactggtctgttgcctgtttgcgctctgggggatggcgggcaacctgaatgatattttgatcgcccagtttaaaaagggcttcgatttaacggatacccagacggcgctggtgcagtcgatttttttcctcggctacttctttgtcgccctgcctgcggcggcgctgattaagcgttattcctataaagcggcgattattattgggctgtgcctgtacgccctcggctgtttcctgttcgtcccggccgcgcagatcatgacctacggcgcgttcctcgcctgcctgggggtgatcgcctgcggactctcttttctggaaacctcggcaaacacctactccagcctgctgggcccgatccactcctccacccagcgcattaacttttcgcagaccttcaactcgctgggcgtgatttccggcgtgctgattggccaggtgatggtcttcggcgaaaacgatccgggccatgaacagctgctggcgatgcccgccgccgccgcggacgccgcgcgccatcagatggtcggccaggtggtcgggccctatctgattatcggctccgtgctggtggtgctggcgctggtgttcgtgtttattaaattcccgtcgtgcaagggcacgccctctcagcagcaacagctcccgacggaaagcatggggcctacgctgaaacgcctgtttgccatcccgcgctttcgcctcgggatcctgtcgcagtttttgtacgtcggcgcccaggttggcgtatggagcttcacgattcgctttgtgcagctcgtgcagcagggcaccagcgagcactccgcaacctactggctgctggcttctctggtgatttacgccgtgggtaaaacggtggccacctggttgatgaaccgcctgaatccggcgctgctgctcggtacctttgccctggccgccaccgcccttttactggttgccgtattcagcagttcaatgctggcggtctatgcgctcattctggtcagcttctgtatggcgccatgctagccgacaaactttggtctggtcatcaaagggatggggaaagatacccagaccgcaggctcgatcgtggtgatgtcgattatcggcggggccgttattccgctggtgatgggcattatctcggatatgaacggcggcaatatgcaaatcgcctttatcgccccacttgtgtgctttgtgtatgtcgctttctacggtttctggtgcgtgcgtaagggggtataacatgcgcgaactggtcaacacgattgctcatattggctatcaggtcagcgacttaacgcgttcgctagccttctatgaaccgctgggctttcagcgccagcagcggtttagcaaaccgtcgccgcagggcgctattgaagtcgcgtttcttgaaatggcgggcgccgtcctcgagctgtaccagcttcccgaaggaacgccttttgacgcccctcgctgcggtatcgatcatctggcgctggaagtcagcgacctggatgcggtgcagcagcggctggcggcgctcggttatccgctcgatgaagggccgattgaggaagaaaatgtgcgcttcctgcttattcgcggccccgatggcgaacggctcgagtttgatgcctttaaacgctaaacggccgggctgatccccttctcccttttaggcccggttaacacgggtctaaaagcgggcttcctcaggctttacaaaagcctgcctgcttccagattttcgcccccccacctgacctctcctgcctattgtgcaatgttacaaaattgcttctgttttgttgattttctattgtgagccattcggcaatttcctctcctgaatttccccagactacttccagtcaatacgcaatatcaggagagacaaatgagcagcacctccgccgacttccagaatctgtaccaggccctgagacacagcgccgcccgcagcccggatgccctggcgctggcgtttgaggatcggcgctatctgtaccgcgattttcacctgcgggtacagcgagcgatggcgcagcttgaccaggtctggtcgctgcgcaaaggcgaccgaatcctgctggcctgggggaatcatcccgcattttgcgaagtcctttttgccgcgcttggtctgggcatcgaagtggtgcctttcagcacgaagcttaagcaggccgaaagcgaggagctggtgggccatatcgccccgcgggtcgtgctgttcgatgcgaccgtgcaggactggctgaaaaacacccccgacgcgcgcgcggtttcgctcagcgaatggcaggcgctcccccttcccgaaccgctgacccgccagccggtcccggttaaccgcgacgatacggcggtgatgatgttcacctccggtaccaccggagagcctaaaggggcgattatcacgcacaataacctgctctgcgcgattgacgcctatacgcaaaaactgaatctcaccgccgcggatagcaccattctggcggtacctatctatcacatcaccggcctgtcggcgctgctggcgctgtttattagcctcggcgcgagcatctggctgcagcaccggttcaacgccccgcaggtgatcggcaccctgcgcgaacagaacattacctttctgcacggctcgccaaccatctttatccttctctgccaggcggcgcgcgagcagagcgccagtcatccaggcgatttccccgcgttacgcacgattgcctgcggcgcgggccatctgagcgatggactgatcaacgagttaaaaaccctgttcccgcacacggcgattcagccgatctacgggctcaccgaaacgacctcacccgcgacgatttttccgggcgacgtctggggcagcgataaatgcggcagttcgggccaggcgatccccggcctcgccattacgatccgcaacgatcgccagcagctcctccccgccgggcaaatcgggcatatctggctaaaaggcgacgtggtgatccgcgagtactggcagcacagcgaacgacgcccgagctgcgatgcgcagggctggttttgtaccggcgacctgggctatctcgacgatgaaggctggttgtacataaaagaccgcagcaaggacatgatcaatcgcggcggagagaagatttactcgctggagctggaaaacattctctctacctatcggggagtgcgggaagttgccgtcatcccgacccccagcccgatctatggcgaagagccggtggcgtttatcgtgccggacggccagcaccacctgaccagcgaagagatcctcggctggctgaaggtcaaaatcgcccgctttaagctgccggcgcgcattattttcacccgcgttttaccgcgcacccataacggaaaagtgagcaaacaacagctcaaaacgcgcctcgcggaatccatcatcacgctatcaacggaggataaaaagtgagcagcaaatttatcgacgcccatcaagcggcccagcgggtcgccagcggcgacaccgtctgcaccgtcgggatgacgcttatcggcgcggcggagtccattttaagcgctatcgaagcgcgctttctgaccgcgggcgaaccgcgcgacctgacgctgctgcatgccgctgggcaaagcgatcgccagcgcggcatccagcacttcgcccacccgggtatggtaacgcggcttatcggctcgcactggggcctggcgccgcgctggatggcgatgatcaacaacaacgaagtggaagcctggtgcctgccgcaggggcagatcgtccatctctatagcgcgatggccgccgggcttaccgggcggctttcccccgtcgggctcggtacctttgtcgatccgcgcatggaaggcgggcggatgaacgcccgcacccgcgaacggcccgatctgatcgagcacgtgacgtttcgcggcgacgaatatctgttctacccggccattcctctggacgtggtcattgtgcgcggcacccatgctgatgaagagggcaacctcacgaccgatgaagaggtgatgaagctggaagttctgcacgcggttctcgccgccagacgctatggggcgaaggtgctggcgcaggtgaaatatcgcgtggcgaaaggctcgctgcatccgaaaagcatcaccgttcccggcaacctgatcgacgccattgtggtatgcgaagagccgcagatggatcaccgccagacctccagctgggacttcgatccggcgctgtgcggcgatatccagctgcccgccgcgcagaacgcgccgctgccgctcgacctgcgcaagcttatcgggcggattgcctgccgctatctgacgcccggctgcgtcatcaatctcggcaccggcattcctaacgacgttattggcgccatcattcaccaagaacggctcggcgagcaggtcaccatcaccgtggagtctgggatctacggcgggcagcaggcgggcggcgttgatttcggcatcggtcgtaacctgagcgcgatgataagccaccaggatcaaatgctctattacaacggcgcgggggtcgatatcacctttatgggcgccggcgagatggacccgcacggccacgtcaacgccacgcggctcggcgcatcctgccccggcgcgggcggttttatcgatatcacccagaatgcccgccacgtcgtgttctgctcctcttttaccgccaaagggctggagatcgcctgtgaacaaggggccctgcatatccgccgcgaaggcgaggtacgcaaattcgtcgccggggtgaatcaggtttcctacaacggcgagctggcccgcgccaaaggacaaaccatgcattacgtcaccgaacgggcggttttcgaactgcgcccggaggggccggtgctgacggaaatcgcccccggtatcgatcttgagcgcgacatcctggcgcatatggattttcgtccggcgatcgccgcggatcttcaggttatggacagtcgcttgttcaccccgcagccctgcggcctcgcggaacatctgtcccggaattcatcctctgactcacaaggaaattagctatgaaacttgccagtaaaaccgccattgttaccggcgccgcgcgcggtatcggctttggcattgctcaggtgcttgcgcgggaaggcgcgcgcgtgatcatcgccgatcgcgacgctcacggcgaagccgccgccgcatccctgcgcaaatcgggcgcacaggcgctgtttatcagctgcaatatcggtgaaaaagcgcaggtcgaagcgctgttttcccaagccgaagaggcgtttggcccggtggatattgtggtgaataacgccggaatcaaccgcgacgccatgctgcacaaactctccgaagcggactgggacacggtgatcgatgtcaatctgaagggcacttttctctgtatgcagcaggccgccatccgcatgcgcgagcgcggcgcgggccgcattatcaatatcgcttccgccagctggcttggcaacgtcggacaaaccaactattcggcgtcaaaagccggcgtggtggggatgaccaaaaccgcctgccgcgaactggcgaaaaaaggcgtcacggttaacgccatctgcccgggctttatcgataccgatatgacgcgcggcgtcccggaaaacgtctggcaaatcatgattaacaagatccctgcgggctacgccggggaggcgaaagacgttggcgagtgcgtggcgtttctggcgtccgacggcgcgcgctatatcaacggggaagtgattaacgtcggcggcggcatggtgctgtaaggagaaaaaagatgacacaggctaatgatattgtggttgtcagcggcgtgcgtaccgctattggcacgtttaacggcagtcttaagcatacccaccagcatgacctcggagctgcggttattcgcgaagcgatcgcccgcgccggacttgcgccgcaggatatcgacgaaacgatcgtcggcaacgtcgggcaaatcgccgaaagcggttttatcgcccgcatctgccagctgcgggcggggatcccgcaggagagcaccgcgtattcggttaaccgccagtgcggctccgggcttcaggccctggcggacggcatgatgcagctgcaaagcggccaggccgaggtggtcgtcgcctgcggaacggaaaatatgacccagttgccctactacctgcgcaaagcgcgcgatggctatcgcatgggccacggcgagctggaagatggactgatctccatccttacctggccagaagggccttatcacaacggcatcacggcggaaaacgttgcgcaacgcttcggtatctctcgcgaagcgatggacgatttcgcctggtcgagccagcagaaggcgctgaaggcgatcgctgaggatcgattccgcgagcagattctggcccttgaggtaccggacggcaaaaaagcgacccgcctgttcgcgaccgatgaacacccgcgcgacaccccgcgcgaaaagctcgccgcgctgcgtccggcatttaaagccgacggcgtggtgacggcggccaactcctccggcattaacgacggcgcggccgcgctggtgatgatgacccgccagcaggcggaacagcgcggcttaaccccgcgcatgcggattcgcggctgggcggtcgccggctgcggcgcggagattatggggtttggcccctctcccgctacccgacgcctgatggaccgtctcaatatggatgttcacgccatcgatttaattgaactcaatgaggccttcgccgcccaggcgctggcggtgatgaacgatctgcgtctcgatccagcccgcgttaacgtcaacggcggcgcgatcgccctcggccacccggtgggcgccagcggtgcgatcctgccggtcaaactgatgtatgaaatggcgcgcagcggcgcacgcaccggtctggtcaccatgtgcattggcggcggccaggggatttctatgctgttcgagcgcgaaggcgcttaggaaaagacggcccgaagtggggcttcgggccgggcgtcgttcgggtcagcacccggcgacaacctgtgagctgacgaacgggatcgacgcgatcccggcaaggcttctgaccacgaatacggggaaataataaccatgtccgcaataaatgaaaaggcggtaaacggggcgcagctacagcgcacccataaaaagatctaccgccatttgatgccgttgcttatcgtggcgtacatcatcagctttattgatcgtaccaatattggcatggcgaaagcgaccatgtcggtggatatcggcctttccgcaaccgcattcggcctcggggccgggttgttttttctcacctacgcggtgctggagatccccagcaacctgtttttaacccggattggcgcacggcgctggatcgcccgcatcatgatcacctgggggatcatctcctgcggcatggcgtttgtcaccgggcctacgtccttttacgtgatgcgccttttgctcggcgccgccgaagcagggctctatccgggcattatttactacctgaccctctggtttggccgcgaagagcgcgctaaagccaccggtctgttcctgctgggagtctgcctggccaatattatcggcgcgccgctgggcggattgttattaagccttgatggaatgtccggctggcacggctggcagtggatgttctttatcgaagggctgcctgcgatagcgctggcgttcgtcgtctggcgcaggctgccggataaacctgccgacgcccgctggctggacagcaacgacgtggaggcaatcaacgcggtgctggagaaagaagccaaggagacgcgccatacgccgagccgtttttccctgaaaaccgcgctcaccacccgggtgtttttgttgctggtgctgatttactttacccatcagttttcagtttacggcctgagttatttcctgccggggatcatcggtagctggggccagcttactccgctgcagatcggtctgctgaccgccatcccgtggatcgcagccgccgctggcgggatcctgctgccgcgtttcgcccggacggagcagcgttcgcgcagcatgctgatggctggatatctggtcatggcgaccggcatggccattggcgcgattgccggccacggcgtggcgctgcttggcttctcgctggccgctttcatgttcttcgccatgcaatccatcatctttaactggctcccctcgatcatgagcgggcatatgctggcgggcagcttcggcttgcttaactgcctcgggctgtgcggcggctttctcgggccgtttatcctcggcgcgtttgaggaccgcaccggcgcggcaacgtccggcttatggttcgccgtcgcgctactgatcgtcggcgcgctggtgtctctgttcatcaaaagttcgtcatcccccggcagtgcatcggcaaaacaagccgacggcgaaaaagcgtaatcaggaggttcttatgcgcatcgaagtcttactggatttaaaaactcgactcggcgaaagcccggtctgggatgtcgaacagcagcgtctttggtgggtggacagcctcgacgggcgcctgttcgcctgtaacgcgcagggcggcgcgattaagagctgggacgtgcggcagaaaattggctcgttcgccctgcgccagaacggcgaaggcgcggtggtggcgctagagaatggcgtgcatctgctcgacttcgccagcggcgagctgacgctactgcaccatccggaagcggaccgaccctttaaccggctcaacgacggcaaagtcgatcgtcagggacgttttctgtttggatcgatggatatgcgtgaagaggagccgagcggcgcgctatatcgcctggacgccgatctgtcgctgcacgtgctgaagaaaaatatcatcgtctctaacgccccgtgctggagcccctccggcgagacgttctattttgccgatacctggacgggcgaaatctgcgcctgggactacaacaccgcgaccggcgatctctccggagaacgagtcttttgccgtgtcgatcgcagcgaaggcggcgcggcggatggcgccaccgtggacagcgaaggctatctgtggaacgcgctggtctacgcgggcaagctggtgcgctacacgccggagggcaaggtcgatcgcatcattgagatgccggtgaaaaaagtgaccagcgtcatgttcggcggcgaaaacctcgacgtgctgtacgtcacctcaatggcgcagccgcccctcccgcgcttcccggaagataatcagctgcgcggcagcctgttcgccctatacgacctgggcgtgaccggcgtagcggaacggcgttttgccggctaagccaacctccggctcgccgcgataacaataatacccggcgaactgactctgaccctgacaccaggcggcgcgcatcatgctgtcgcgacgccgcggagtaaacacgactatgacaacaatcaatcacacaccagccggcgaacaaggtggaaaaaagcggctgatacatcgtttctcctgggtttcgctgctggtttgctggctaatctgggtgcttaacgcctacgatcgcgagatgatcctgcgccttggcccggtcatctctaaagagttttcgctctcgccggaacagtggggcaacgtcgtcgccctgattatggttgcccttgcggtgctggatatccccggctccatctggagcgatcgctacggttcaggctggaagcgagcgcgctttcaggtaccgctggtgctgggctataccgccctctcttttctttccggaattaaagcgatcagccacgggctgacggcttttgtgctgctgcgcgttggcgtcaacctcggggccggctggggcgagcccgtcggcgtcagtaacaccgcagagtggtggccgaaagagaaacgcggcttcgcgctgggggtgcatcataccggctatccgattggcgcgctgctgagcggcgtggtggcaagtctggtgctttccgcatttggcgaaggcagctggcgctactgcttcctgctggcgctgatcgtcgccatcccgctgatgattttctgggcgaaatattccaccgccgatcgcatcaacacgctttatctgcatatcgatagccaggggatgacgcgcccggcgacccaggaaagcagccatgttgccaaaggcgaagggatgaagacctttttacgcaccctgcgcaaccgcaatatttcgctaacggcgggcaataccctgctgacgcaaattgtctatatgggcattaacgttgtgctgccgccgtacctttatcacgtctccggcctgtcgctggcggcatccgccgggctaagtattatcttcacgcttaccggtaccctgggccagataatttggcccaggctctccgatagctttggccgtaaacgtactctgatcgtctgcggtctgtggatgagtatcggcattgcgctgttctatttcgccaccaatatgccgcgccttatcgccattcagctattttttggcctggtggccaacgccgtgtggcctatctactacgccatggcttcggactccgccgaagaacgcgccacctctaccgccaacggcattatcaccacggcgatgtttatcggcggcggcatttcgccattgcttatgggctggctcatccagttcggtgggggatgggaaaatccggcgggttatatctacgccttctttaccatggcgggatgcgcgctgctggggatgttattgcagctcatgaccaccgataaaacgccgcgcaaagcgcattaacgcaggagaacgcatgaagattgttatcgcgctggattcgtttaagggtagctgtagcgcgcaggccgcttgcgcagcggtagcacaggggttgcgccgggttgacgaggagctggagctggtcgaaatgcccgtgtcggacggcggagaggggctgctctcggcccttgcggaaagtccgcagctgaagggcgcgaggtggcagcagcagcgttgcgcctcgccttacggtctctccgtacaggccgcatttctgatcctgcccggcgaacgggccattatcgagatggcgcaaagctgtgggctggagctcacgccgaaagcgcagcgggatgtgcgccaggccagcagctttggcctgggtgagcaggtaaaagcggcgctggatgccgggtgtcggcgtttgattatcgggctgggcggcagcgcgaccaacgatggcggcatcggttttgcccaggcgcttggcgcccgcttctggcgcgaggacggcacgctgctgccggttcccgcggcgggcaaggacctagcgcatattcagcgcatcgatttaagcgccatggacccgcgcttacgacaggccgaaatacaggcctcctgcgacgtcacaaatcctctgcttggggaagatggcgccacctgggtgtatggcgcgcagaaaggcgcggatgaggcggcgctcagggagctggaggcgggtatggcgcactacagtcggcagcttacgcaaacgctcggctacgacgtcagcgaacggcccggcgccggggccgcgggcggtatgggggccgcgctgatcgcctatgcgggcgccacgctgcgcccgggcattgacctggtgctcgaactgcttaacgccgaccgtcatcttagcgatgccgcactgaccatcgtcggggaaggctggctcgatcgtcagagcgcctttggtaaagccccggtgggcgtggcgggcaaagcggcgcgccacggcgtaccggttgtggccctttgcggcggacgcgatgaaagcagtcggcaattgtatcaacaccatattgacgcgatgtggtctatctgccagcgccctatgccgctggcggagtcgatgaacacatgcgaacagctcctcgccgacgcagcggagaatgttctacgaacctttctgagcgggcggcgcggagaggcacataagcggataactgtatgattattacgacggcgctggctaatgaaattgtcgcccgggcaatggcgataattcatcataacgtgaacgtgattgaccatcatggacagatcattgcctcaggtgaacggcatcgtatcggcgagcagcatgagatcgcccgtgaggtgatacgcaccggtaaacgtatttgtattaataacaccgcggaagccgcgcgtttccagaatgtgcatcccggtattaatcatcccattatctatgacgatcgcgtggtgatggtggtgggcatcagcggcgatcccgcggcgatcagccgctatgctgaactggcggtactcaccgccgagctgctggtccgccaggccatagagatgcgggaaaccaactggcgacagcgtctgcgcgataccctgtttggtcaatatcttgatcaaggcgcttcgcccgccggacaggaagcgctgcatcgcctggtggagcttggcttcgcttttgatgcgccgctggtgccggtcgtggtaaccgtgcaggtcgaacagcatcagctaagcgaaatactgagtacgctgctgcgggaattctcgcagctgtccggggtaagagacgtgattttgctgggcagtaatgaaatattgctcctcaatacgctgagcgaatcccaggaaacgctgctgcggggcatcgagtttgtcctcagcaatcagatcagccattaccatatcggtattggcgtgcaggcggacagcgctccggatattcgcgaggccatccgattcgccaggtcggtgattgaggtggggagcaaagtgcagccgcagcggcagatctactactttcgcgaaatggcgatgctctgcctgttccgggtgctggaagacagctatatggtcaatttttttatcaataacgtacgccagctgcttgagcatgattccggcgaagtgctgctggataccctcagcagctttattgccaataacgccgagccgggcaaaacgtcgctgctgttggggattcatcgcaatacgctcacctaccggctgcagcagattaaaaagcatattcagctcgatccgatggtcttcaccgacctgacgcagctggcggtgtcggtacactgctatcgtcggcagaacccgcgccagagcgaatggattgataccttaagctaacgtgcggcgggctagcaggccggtacgcgccctcgccacccggcaccgcgtatcactctgagatcgccgtttatcaaaataatagcgcgcccggcgattttatcgcaggcggtgcctccgtcgccggtggcgggcttttcgcctcagccgttcggcggagcttgctcgcttcagtcgccatttttgtacgcaatttaatcaaatggcaccgttcttgccttttatctacgttccccgaccgcagcattcgtcggccaatatcgataaaaaggacaggaaaatggcgcaaatgaatgaaaacatcgcgaccgcaccggtctctcccctccgcgattttttcgcgaaaccccgtatcatcgccaggcccggctttaaccgctggctggtgccaccggccgcgctggcggttcatctctgtataggtatggcctatgggttttccgtttactggctgcctatgtcgcagctcataggaggaagcgcgtccttgcaatgccccgccacgatgtcgttctggcagcagctgtttacccgcgattgcgactggaaaatctccatgctgggctggacctacacgctgttttttgtttttctcggctgttcggcggcgctgtggggcagctggcttgagaaggttggaccgcggctggtgagctttattgccactttgtgctggtgcggcggcctgctgctatccagcgtcgctatctatttccatcagctgtggctgctgtggctgggggccggggtcatcggcggaatcggtctcggactgggctatatttcaccggtttcgacgctgctgcgctggtttcctgacaagcgcggaatggcggccgggatggcgattatgggttttggcgggggagcgctggtgggcgcaccgctggcaaacggtctgatgaattacttcgccggtccggccggcaacggggtatggcaaagcattctggcgctggcggcgatttatgcgctgtttatgctcgccggtacctttggctatcgcctgccgcccatgggctggcatccttcgggtgagaaggcgcaaaaaacgattcgcaataatcccacgatccaggtgcacgtccgcgttgcctgccgcactccgcagttctggctgctgtggatggtgctgtggctcaacgtcaccgcggggatcggcattctcggtatggcttcgccgatgctgcaggagatctttgccggcaaactgctgtcgctcgatctcagctggcatgagctgaacggcgagcagctgaaacgcattgcaaccatggccgcaggatttaccggcctgctcagcctgtttaacatcctgggacgttttttctgggcatcggtatccgacctgtgcggacgcaaaatgacctttgcgatcattttctgcctgggggccgtgctgtacggcacgttgccgctggtgaatcacggcggctatatcgcgctgtatgtctgcgcgatgtgcattatcatttcgatgtacggcggaggctttgccagtattcccgcctatctggccgacgtctttggctcacaaatggtgggcgcgattcacgggcgcctgttaaccgcctggtcggcggcggggatcagcggcccggttctggtgaactatctgcgcgagtatcagctgacgcacggggtctcgcccgagcgcgtctacgatattacgctgatggtcctgaccggcctgctggtattgggttttatctgtaatcagctggtgcgtccgctgacggaagagcatgcgatgaccgcggaacagcagcagcaggcgaaaggactgtataccatcaacaaggatgcccagctcacgtgggagccccgcccgtccacgctgctgttaaccgtaagctggctggcggtgagcgtgccgctgttatggggcgtcggtaccaccctccagcaggccgtgaaattctttatgtaggttgttgccgccgatggcccggcggcttctacgaacctaccggcgcgtggcgatcgcgtgacgcaatatgctcaacgatccgctctaccgcctcttctgcggtcagcaccgaggtatccagagtcaggctggcggtgcgccagggttcgtactcacgggtgataaccttttgccagtccggcagaatatgaccgcgaatatccgccactcggttttccacgcgataccgatgctgcatttggtcggagcaggtcagttctatctccagataaggcgcggcattctcggtcgcgaccgctctccaggcctggcgggtaatggctatagggttaactgagtcggcaatcaccacgttgcccagcctgaggttatccgcagcaatggcgtacgccgccagatatccggccggtcctatatcgtgccgggtgacggtttcggcgcggatcagcgcctgttcaattgaatcaatccgtaaccagacggcccccagcctggcggcaagcaggcgagcgatggttgatttcccggtaccgggcagaccgccaaagatcagtaacatcgatatcccattacggcagcgtcatgttattgccgctggcgatgattattggtgattttccatcttacctgaccagggttcttattcagccaggcattattaatattcaatactggctgaaactgcataagcggcatcaggaggcgtctgcagataattgtcatagtcaccctccagaatatcgttcagtgagaatgataccgtcccgcaggccggattgtgataaatggtgacgttgctcatagatagcagtatctcatgacaaagtgaaagagagacgtagcgccaggataaagaagtacagttgatcaagcgcctgggattcagtgattattgtagcctggcgacgtcagatagagaggcgtgcctgccatctcatgccgggtaagcccttgtagtataataattttcgctatccaatcatgaccccatataaactcttcagccggaaaaatttttcccacataagacgttctgagcatccagtacagcctccctcgtctcattgaccctgattgccgagtagatatcaatattcagtttctgagattcatcgtctgtcagttcgcggtagcacagcccttcctgattaaacgtgcatttcgactggggcatcagtgcaaaccctttgcctcttgcgatgcgggtgagcataacgagtgaatcatccggctctttaacccttttgagcgggacattgagctgttcaaaaaaactttcacatttgtcataaaatgaagggtttgcgcttcttgaaaaccagaaaagtggtaaatcactgacgtctttgagcgatactttttctttcaggctggcgggatgtatagccggcattgctatcagcagcggttcgcagcaaacccagcgatactgaaccatatcttcatggccagtgcccttttcccccgtaagcacgaggtcaagcgtgttttttgacaggcattgaaggagctgggcagaagtcagattaggtgtttcaacgtcgtctccggcatccagttcgataagctgtctgctgacgggttcgataaattcaaaattaagcgtccgggtaaggccgatccgtaccttccccccggatgccagtgaaccggttttcagttcattaagttccagcaggatcttctctgctcttattaccagggcctggccagcctccgtcaggctgacgtcatgcgtactgcggctgaatagctgctgattcagcacgccttcgaggcactttatatgtcgggttagcggaggctgagtcattctgagccgttcagcagctctgcgaaaattcagctcatgagcaacagcaaggaagcactggagctgtttaacgctagggaggtggttacttatcaggtgtcctgcgatcgccatagattcgagcctgccagtcaaaaaatttattctaaactcttttgtattctgagtgttaacacgaatgatcatatcagggatcagtctgtttacagtaatacgaaaattgaattacacattaaacaattccatcctcgtcacagcttgataaatttctcccgaactcaatcagaaatctatttggagataaaaatgtcagctaactatgtactggtctcacgctttccgttaaaaaataatgtttccgctgctgatttctcgttcttaaaaaacagcggcagcacacgatactattattcagaagagcagggagtgaatgaacttctggagctgcgtgcatttaacgacatcaaggaaatttcgtgggtagaagaagagatggtatccatgttccacagactggctgatattctttctgccgatattcgcagagaattgcttaagtttgtagaatctccgattgacaacaagaaagatctccctgaaagccagtacattcaacttcgccatgttgaagttccggctcataattatcagcagtatcgtcagtggcgcgatgagaccatttttaatgttgtcagggacaataaagataaaattgaaagctttgaagcattccactctcttattagcggtgttccgggtgtaatgtttatctcctccttcaatggcgataagcaatcctataaggaagccttcaccaatgcgcgttaccaggaaattatccagcaagctggagacaattacatcaccggaggcaatgaaggactttacacccgcatctaccatgcctgttgcagctgaggaatgataaatgaactataaaaaactggttattgtaggcgataagtttaatgaattcgcaaatggtaaagatgttctgacaatttctcagcttgaattactttcgcaaattccagccaacattattgataaagaacatgagattattatcggccagggtgtacgtaaagatttcgcaggaaaagtcatttcgaatcaggcaagaaatgttgttcatggcaataaacttaaaatgtgctctctggaaaaattggtcagagataaaaaaaatgcacattgtcataaaaggttggagcagaatgttcttatcggctcagcagagcagaccgaacataacagtgaactttttgcaatgccgctgctgattgacgaacgctgtgagctcatggccgatcatcagaccggccagcatattcaggggatgcttctggtcgaggcaagtcgtcaggcttttatcgccgttaccgaagagtttatttataagcaggaagcaggacgctactacgtcattaacagcatggcgatgaccttttccagctttctgtttcctttaccggcgctggtccattttgaattccttgagaaggacattaatgagcgaagggggcgtttcagagcacaggttcgcgtgactcagcatcagacgctttgcgcgacgatggatgtatcgttcaccgtatatccttcagctctgattgctgaaaaggaaaaactgctggctgaagccgccatgcaggcgacaattgctgaacagaacatcgcgacacacggggtgacgcatgtccaaatcagctagccgaacataccgcctggctgtgaccacgcaggggccgctttacccccctgcggaggtcatggacggtaacggcaactttgtggtggttggcatggtgccgggtgataacgggctggaatggcgaagcgtgcttgtggcagcagacagccccgtgcccgaattcggcgcgacgaagccttacagaatattgcgagatattgaaggtatggcgcaggatgaagttaaggatatcatcctgcatacccttcctttacccatcccatcaaataattacgggatgctttttgcaccggagcagcgaccgcaggcgaacaccgaaagccgccccagtctgcctctgcatgaaggctatattgctgattaccgcagcagtgatggcaaacgtcaggttcagcctgtcacactggaagactggatgcatgcggaaggtacgctggatgtctgtctgtctgaagacagcaggcgcgcaaggtttacgttttctttccgtaatcttgttcccgacagtgtttataccgtgatgagccttcgggaaaaagatttagcgactgagaatccaagccgaccgggaccattgggcatacctaacgtttttattaccgatcataacggtaatgcagattactgggcggaattgcccgatcctttcccggcacatgaacggaatgaaaaccggattattaacgttgttgtcctgtatatgagttcccgccagagctacggcggcgcaatcggactttatggtctgggtggtgacattcatgctcatttaaaactaaaggtccgttcctttgatgaatttactaccgtagagtgaggtaaaatatgccatttgttcacatcaccacctggcctataaaagatgaaggtaaaattatccggctccaggaagatattacgtttgctgtgcataaacataccggagcgccgctggataaaatctcggttgtcatttctgaaatacatccttctcgctgggcagacgcaggggttcccggaaaccataaagattttcaggaaaaaagccgaaggaaaaattacgaggagtgagttttgcaacaagcagccgctttttttgacgtcgatgagacgctgatcaatattaaaagtatgtttgatttttttaacttctggtgcaaggagaataatgaacacattaaactccataattatatggcgaatttccagtctgaagttaaaaaaggaactccccgtgagcatctcaacagggaatactaccggcaatttgcaggtatcagttataaggcacttgaagaggctggtgaaagatggttcagatttaagctgaattcagaattatttataggaagcgcggtttcggctcttaaaaaacatcaggctgaaaatatggatattgtttttatatccggctcaatgcttcccgttctttctcctgtcgcaagataccttggcgtgcaagatattctttgcgcaccactgaagttcactgctgcaggggaaatgacgggtgaaataggttatccacagacgattggtgacggaaagaaagatgcgctccttcagttttgcgaacagagaaatattaatccttctgactgttatgcctatggtgacgatctctctgacattccgatgcttgcatcaaccggccaccctgtctgtgtaggaaaacattcagcgctggccagacacgcgataacacatcgctggcaggtcatttaaaccaaccttgaggtaagaatatatgcattcagaaaaatccccgcaggatatgaccttcaggtcttggcttgccttgtttattctggccctttcaacgtttactatcgttaccacagaactggctccggtaggcctgctgacgcccattgcagagggacttggcgcctctgagtcagcggttggtatgacggtttcactttacgcctgggtgggcgcactgagcgcactctttgcatcagtatttcttggtaacgtggccaagaagcggcttctgctcacactcacggtcatactttttctttctaacgttcttgccgccacggtaaacacatacgccatactgctagtcgcacgcgtactgggcgcgctggcacatggcgcattctgggcgatgatcggcgccaccgcagtggctatcgtgccagcccgattccttggcgcagcaacgtctatcgtttttggtggcgtctcggctgccagcgtatttggcgtgccgatatcaaattatattggtatacacttcggctggagacaggcgttctggctgatggctttactcagcgtggttgcctttgccggcattaccatactggtgccacagataaccagtaaaagtgcgatcggcctgggggcgctcaaaagcgtatttaaatcctccgcgctgtggaaaatttattccgccacgttactggccgtaaccgcacactttgccgcttttacatacattgaaccctggctgcacacgcagcattcccttgccacatccgtcatcccggcggttctgtttgtttacggtatcgctggtcttgccggcaattttctcaccggaatggtgattgataaacatctcaaagcaacggtatcggtatcggtcgtgcttatctgtgctgtgctggtatttctgggtttatccggtacatccctttcaggcactgcggtctttaccgcaatggtcatctggggcgtggctgtatccgggatttttgtgggcttccagacgtgggtcctgcgcctggcggaagataaagccttcccggcgtccgcggtttacgtttcattcttcaataccgctattggtgtcggggcgtctgcaggtgcctggatggtatccgctttttccgtcccactgctttatatcgcagccggcgcagctatcgggctttctgtccttctcgttgccgctattccgacgcgcctgaggtctgaacaaaccactccggagaaatattatgagccaaactgatgagctgacacgctatggcagagacattatggatcgtcttgagtccggactcgccgataaagtcaccacccgactgagcgaacttgattccaccttaccgaccctgattaccgattacgcttttggcgctgtggttggccgtcccggactggatctcagaacgagagaaatgctgacggttgcttcgcttgtgacgctgggtaacgcaatgccacagcttgaattacacatgagagcggcactcaataccggcgtcaccccggaagagctgcttgaaatcgtgatacagatggctgtctatgccggcgttccggcatgcatgaacggcctgacggcctaccgcgccgctatggcggcgaccggccatactctgccaggcctgaaagaggaaatgtcatgaacgaagttgtgattgtttctgcaaaacgtactgcaacgggtgcattcatgggttccctgtcgggccattccgcagcagaactcgggagtcacgtcattcgtgcgcttcttgaagactcaggagtggaggccagtgagatttctcaggttattatgggacaggtactgacggcaggatgtggccagaatcccgcacgtcagtccgcgctgaatgccgggctacccgttgaaacgcaatgtctgacgattaacaaggtctgcggttcaggtctcaaatcagttcatctggccatgctggcgctgcagacgggtgaggcagaattcgtcattgccggcggtcaggaaagcatgtctaacgcccctcatattctgatggcttcacgctccgggacaaggctgggggattgtaatatgagggatagcgtggtgtccgatggactctgggatgctttcgataataaccatatgggcgtcaccgccgaaaatgttgcagctgagttcagcatcagtcgcgaaatgcaagatgaatacgcgctgctgtcccacataaaggcaatggatgctcaggaaaagggaatatttgctcgtgaaatagttcccgttgaatggcaggacaggaaaggcaaaaccctgagagttgacacggatgaaggcccccgcaaaaccagcattgaaaaactaatgcagctgaaacccgtattcagaaagggaggaactgtgacggcaggtaatgcatcctctcttaatgatggcgcggccgctgtccttctttgtaccagaaaaactgccgaggcacgtgggctgccggttttagcgtctcttgccgcgtttgcgaattcggggattaagccggcattaatgggtgccgctccggtacaggctatcgcagactgtctttcccgctctggctggaaaccagaagatgttgatcacctggagtccaatgaagcgtttgcagcccaggcgctggcagtgattgaccagacgggtatttcacccgatcgtattaatccctatggcggagcaatcgcactcgggcatgctatcggtgcctcgggatgccgcattctggtcaccctcgtgcatggcctcctgcgtaatgataacaaacgcggtgttgcagcgctgtgtgttggcggcggtgaaggggtggcgctgagcgtttaccgctgaagaaaaattatcggctgtacagcggctgggctgttaatgaaaaacaaaacaaccgggcaatgcccggtttcatattatgtaaacggatttcaggcattaacgcctttcataccttcttcagaataccggccgcctttaatctcaacgcgctggtgaatatcgttcagtagcacaacatctgatttgtccagagcgatgtcagccgcctgcgcattttcggccagataactgatgtgcttggtaccggggatcggtaccagcttatcgtactgcgcgagcagccaggccagcgccacctgacccgaggaacaaccgtacttttcagtaagcgggagaacagcatcgagaagctgtacgttgtgatcaaggctggactgaatgaaacgctcattatttttacggaagtcaccttcagaaaaatcgctgtttttacggtattttcctgtcaggaacccccttcccagcggagaatagggtaccaggccaatccccagctctttcactgtcggcaggatttcatcttcaatgtcacgtgtccatagtgaatattctgtctgcagggctgtgattgggtgtacagcatgggcccggcgaagggtcgatgcagagacttcacaaagtccgatatgattgatctttccatctttgacgagacggctcagacactccatgctctcctcgacaggtgtcgccgggctgaccctgtgaagatagaacagatcgatccgttcaacgccgagccttttgagagattcattacagcagtgggtaatgtagtccggttgattgttaatggtgcgggcataagcctcatcaggcgcccgatcgattccgcactttgtggcaattctgaactgctcacgcgtagccttatcgagtccggcaagaaagtggccaatcagccgttcattgtgaccccgtccgtacaggttagcggtatcaatgaacgtaatatccaggtcaatgagtttatgtaacagctgccgggaagccttgtcatctgtctggccataaaattcgctcagtcccatcgcaccatagccgactgaactgacaataaggttttgagataaatttcgggtatgcataatgactcctttttttacaccatgattgtttcaccccgattacggttaatgaattgtcattttcgttatgcaaaaaaagtatcaaggcgggctgcataaaggtgtagctcgtaacgcgctggcgtgtcggtatgcatgcaccggcaggaagaaatcagggaccgaatgaccgctaaaggctggagagatccagccttccctttttccctgattttggacaataccatccataaagcccgttggtggtaagacaccgcgcggagccgtcaggcgacaacatcagggtatgtcagacatcaggatgaccatatacccgaaggagcgaggccgaaccactggcagagcctgcatgtggtgtgcaagtaccgtgaccactgacagtgtaccttgtgttggtaaactatcgttcaatggtaggacgatcacagacaacttatccaaggtaagctattgatataaatgagaatttatatgaagctttgccacagcgggagatattctggagcggcgaagggattagaacaagatgttcaataatttgaaaaatatagaattttcaagttatatcttaacttatacccccaaagatacccccaaagcacagaggctttgaattcaagtaattacctttgtcgataaatcagcaggaagcgagatgatggcaaatggcaggcatactcgaaagcagcgataccgttagcatcagactaattacgattcattaaacccagatcgcgacgggccctcatgatatcaataatcgtgagatatggcgtttgttcttgccagctaaaccctctgcgatcgatacgaaccagttcgtacttttccactagaaagttaatggcattagcgagagtgataccggcatcgatatgttcctgtatgacggtttcatcacagaaaggtgtatcgtttagtgtcaggccataatgctgttccagcagacgactaagtagcatttgccagatagtcacgggcgacaggcatggcttcgccgcccgcatatttgttgcaggtagaaatttcattttttctctcgtgatagtaattaacgttgagtgggataaatggtgatgtatacgtagccacaactaccaagcgtatcggcttcacaggtgagtccgttgtgatagagggtgacacagtgctgatggcggggggagagttctccgctggtgagtatcagctccagctgcttgagtatcaacggaaaggcctggtcgaggcgcaacgcatgctcgtcgctgaaagcaccgttaaacccggcgcggtccgcgagaaaatgcaggcggtcgccttcctgcaccagacgtgctccaaaacagggggtcatagcacgtttcagcccccattgctggcaggcgggattctccggtatggcaccggattctgagcgattgttcattattgttcctgattaaagtgaaggattaattgagagtaacgcttcgaagaatgacatagggaccattgcggtcctgacgacgttcagcaaacacggccagaacgccgtgtatgtcctgaacttcccggccagcataatggcagatactgcctgaccatttatatttgccagtacagaagcgaaacaggcgggagtcaggatgctgtcggtacagagccatggcctggcgcttactgatgattttcatatccagcctcgctcagcgaacgacacaatgccatcctggccgacaaccagatgatcgagcgtcttcacatcaaccagctccagtacctcctttagcctgtcagtcatctggcgatcggctttgctgggctccggatcgccggagggatggttatgtgcgagtacgacagctgcagcattgaaacgaagcgccgacttcaccacctcgcgggaatgaacctgcacatggtttaccgaaccggcgaacagtgtttcactctccagtaaacgatgctgattatcgagatagagcaccataaacacttcccgctcctgtccggccagctgtaaccgaagccagtcacgggcagcagtacttgaggtaaaggctattccaggctggcgcagatatttatcaagcaaattgatagcccggcggatggtccgtcgggcataaggtgtcaatccggatgtcgctgggagcaggcaaccatgccgggtcatagccgccagcggaaagagttcaggctgcgatgacagcggggataatgcggtattcatgtcaggcattcctcagtcgatgagatgcataatggcgctgcactctggatggtgtagcgcgaagtcacgtaagcgataatagtgctcagtcatcgcatcacattcggtacgacaggcgtggtggctgtatgtcatcagacaggcgactatccctgccgcttcgccagtaagttcagcgccgttgccgttcatgctgttgaacaatgcccacgtcttatcgtgctctgactcaggagccatgaaagcaccgccgttgctgagcgtcgaaaagttccagataccaccgtgataatcgacacacagacggctcatccaggcaaagattcggggctcaagggttatccattgtgggatggagccaaagtgctgcggccagaagccgatgcgtaactcgtcagggaccaccgaggcagtaattgctgcctgctcagcgaactcaaagttttgtgtattcattaaactatctccttatgccggagcggttgtttaacgcccgaaaaaatcgagcatattttctgccattacccacagggcgcgattgagcttcacatcgccatcaataccggtaacagcacgggtgcggctgcttttcccctgagcggttcgccctgacaatccccctttcatcaggttctcctgcacgcgctggtagactgtccacaggtcatcgctgtagtcctcccgacgacgcggagtcagcagctgcgataccgtgaccggctggtggtcttcgccaaagcgatatttcagcgcggcattcgccagcgcgtgacgggccggggctggcagcgccagtgactgcatcgcatcgcgcttctcctccacccggtcaaagaccccgagcacttcgtaagccccttcaatcaccttctcgacgacattgcctttatgcggtacccgcacttctccgaatgactggccgcagaccagaccattggtacagacgcctcgaaatagccccggcaacatctggtagcttgatgagccgtcatggctgttaagcagaatgatttccggcacctgatgtccggacagttgaccggcacgacgcaggcgaagcatgtgtttggtgtgctcccgcttgctctggtcccgaaccttcgtctggcaggcaaagaacggctcaaagccttcacgctgcaggctttcaaggatggtgatggtcgggatgtaggtgtacctgtctgaacgagattcatgtttgtcactcccgaacacgctggggacatgactcatcagctcttcgtaggtcagaggccggtcacggcgtatctggtttatacggccaaagcggctggctaatcgcatgggtaactccttatgcagtgggtaaaaagacaaaaggccacacttcccgaaagaggtgtggcctgactttgtttgtatcggtgatgtgctggtggtggttatgcaggaaatttgcggatgccataacgagtgatataccggttcagccagtaaccggcatccggctcaaagttccaggctcgccagaccatgcaacgctcatgacggacaaccagacggaaatgtgtccccaggtcgtcctctatagcaacgttggaatattgagacgcaaccgcctctgcctgctggcgagtaaacggtccatcaggcaattcagtgagttcagtcatacaggccccctaaaataaaaagcccctgtggcattagcgacaggggctgaatcaaacagatggcgaatcggctaagatgccttaccaccgacaaccgtgacttgtacaggtcggtagtactgcgggtcgaaaacggaaagtggcaggtcaatctggtaaccattacgctcttctgttgccttcatgatttcgacggagctaacgttttccacgcattcgttctccagcgaggcttcctgagagcgagtggcatcgctgtcgccaaatgcagccactgccatattccccatggccagcgtgtttccccctttatctttcagacgcagggaaagtgtcagaggcccgaatccttcaccacttccgccgttgtccaagcgaaactgccacacgcagacattgcccggcacccagaccatgtctgtgttgcggatgctgatgtaacgctgttcttcggcctgagccggtgaaagcagacaaaggctcagagcgaaaactgagataacgcctttcagcttcttcatggatttttctcctgattctccggcagatagagtttccccatttccttgccatcgtgcgaatacaccaccgatttttcacccgtgtagctgtcggtttcaatccggaagctcagggtgatattgtccgcaagacacagggcagcaatcagaggctgcaccgttttctgctgcatatccgcaatgtagtaataattgcctgactcacagccttccggcgactggttggttttcatcaccgtatattgcggtgtgccgaaagcatccttctttacccattcctgggcaatatcggatttatgcgagacaaccttgctgaacggtggcggagtcaggtccttaaaactggctatcgttttcacacccgcatcttccttgcggtcgcagccagaaacccccatggcaccgataaccatcaaaacagtgagaacaggtcgatacaatttcttcatggtgcagattccttattattcgtccgttccgttgcttcagcagttgccagttcgtcggcacaactcagccagactctgctgggctacccactgctgcagtttctgctctgaggcagaacgcttcgccgccagggcagcctgctgctgtttgttgacacagttttccgggaatgcagcaagtatctggttgctgtgaggttcctcagccagctccagctgatactgggtatcgatgatagtgaagtaacaccctttcccctggtcttcgccctgatagaccgatgtcaggtcggagtaataaccgctggcaggtttcagattcagcttgcgcacagtatgcgttttcttatcggcgagaaaataagcaccaccaccccgctgacgcagcaggaattgcctggtccagggataattgccaatcacactggcctgatagagcgtattgtttagcgtgtcgttatccatgccatcggccgacttccagccatccgcctgcatgtactgccagaatttgacggtacccacgacagtttcggcagacgtcggaaaggtagcgccagcgcagagactgacggccagtgccgttgtaatcagtaatttcttcatcatgattccttatgaggtaaaagaccgtcgccagttctggcgagcagtgagtgaaaaacgtgaaaatgaggaagggctctgagtaattccggttcggcgagaacgttacgaatctgaaggtcgggcacgaacagttccgggtgcaaggtaaccgcatggatatcgttcagcggaaacactgccacgcgatgatgatgctcgccagtcagataccaatgcccgccgcagagtacgaggcggtatggtgcaagccctgagcaacgacaaccttcagccagcagcgtcacgcgacgatgctctgatatagccctgacaaggcgtgtaaatatgcctggcctgggtggcgacaatgactccgattctgcccatatgaggcacggagactcaccgggcccactcagcagtgagctgaccatgtggttatccatgtcaggaaacaaggcctccacacctgactgacgagcaaaagtcagcaccgccagttcgcgctgatggctacctgaaagcagacgacaggtgccgtcgcgatattccaggtccaggtacatcagtcgctcacgaaaatcccggcggagggtacggagcgatacaccaaactctgcggcaagaaggcccatatccagtgtttcgccagcaacaaggcggctgataatgagggacagccgaaccgccagccgctcatggcgacgctcagtctgggacattagattttctccatcccgttaacaggctgaaaattaagtgattagtgtaacgaaggggtcggacagggtatggacatgggaaggcgtattttttcagtgcgaggattacagttgtaatgcgcctttacgcgttgaaggtgtattaatcgctcattaattgagcacaaaaaggacaggaagtgtccgctatacgcggtttttcagaagaaaatccagtcccagacggcacgggcaacggtcaccacggcttcccgcacggttcgaatcacagcccttacaggcgctggcagaaaagatgatgactccacattgccaatcatttcatcaactgcatgaccaaagcgctcacgtgcctgcttttttaccggctcggtgcagagccttccatgcagttgtgttgtcagtggactggtggcccggtcaggcaggctatgcatcatagtatcgacaagggtttccacgccccaccctgtgcgggctgacaccacacagacaggatggtgcggcaggaacaactgctgcatcgcgattctcttagtctcaatcgttaactgctgagcaggtgaaggcgtgctatcggtggtacaccattcatgacagggttcggccttgtcgacctgattaaccacgaacaaaacccggtactgatacgccagcatcaccttgcgatagaagtgttcatccactgacagtgcccgatcatcagccttgatgacccataacactaaatccagttcgggtaggatgcggcgatacagtgcagtgtattcttcatcgcgttgctcgctttcacccacaccaggtaaatcaacaatcatcaggctgtgattgccattgcggagcctgaagcgcagcacatcgcgggtgcaggcctccacatcgctgaccgacgtgacttctccctggaacagggcattgcagagagacgatttgcctgccccacttttgcccataatgccaataaccggctcgtactgtgtgagactacgaaggcgtttaagaattagactgcgaagagtatggggcagtgaagccagaggcttctcaatggccagaaggccgtcagatttttgcataaggagatctcagcgcgaaaaataaaaagacccgcgatccggtaaaggatgcggggattcacgaggataatatctatctgaaattatttggattgaatgctatttatcttctgtatatctggcatcgtgccaggcattcataatgataacttccagctcttcgttaatttttcgaccatttttctttgccagcatatcgagcttttctttaatgtccttctggacataagtgttaatcacttttttgtcagcaatgttttcccggaacaaattctggttgtatgtttttttcatccgttgaatcatcagacgccgagtgtcagggtgagcaggccaggaatacaatactgctgtgagaaaagtaatcacttgttgttgtctgatttcagtcataaatgaaggcatgtaatcgggtttgatatgctccataacatatttaaaagcccatgcacattgtttatggtttttaaggtcaatccatttaaatggttctggtaactctcgatttcgctgaatccagatattttttaatgatgagagtgttttgatcttaaagaataaatcgacatcccagctatcaaaacaggtgtagagtactgaaagggcatccttatacgtttccggaataacaggcaataagttatgctgaatgaccggaggccgttcacggtaaaaatcaacctctagtggattaatttccttagggcccatggttgaaagtatattccatgcaaaataagcggagctatagtcctttatccattcaaaatttgtctccgggatgatgctggaaaataatccatttttcatttcccgtacgaacttattgtactcatgagtgtttttaaattcattattaaggtctctcaggatcatatccataacctcctgatttttataatcagttatgaggagtagcggagtgcgctcccggtatccttcgatgtttttcttcatgtattcgatataaaaccggcacgctctttctgttctgtccgtcagctgttctttcataattacattttcattgattttaaagtgggtatcactacgtaggttaatgcgtgtgtaatgcgtagtcaaatgcgttgctttctgcgtcaatatctgcgtaataaaaagtgtagtgaaagttatgttttatgtaatgtgtagtgattcgggattagctggttttcaatgtaaaacaacaggataagctgctcactgaccttcgggaaagtaagaagggctttttcaaaggacaggtagtccggtgactataagcccatgaagacaaaagaggaaggatgacggttacctgagcgattgatgtctgcaacagatgaggtaacggaagaatgtaagacagtcatgcacatgagcgcgtcgaaatacatctcagaaccggttgacccctagaggtcaacataacccgctttttttacgtatctccccatgggtatgccccggagcagtgaccgcaattaaatatcactcatccgggttacctttcttaaccggagataccaaatcatgaccacgcatcccttacttaccgaagaccagttgattgacatggcatttattaccagcctgctgcagatgacagacaagtggatttacaagcttattaaggacggatccttccccaaacctatcaagctggggcgaagctcccgatggcggaagagcgaggtggagtcctggcttcaggaacgtgtcgaccagtcccgtaaataatctcccgccagactaaaccctcagcagaataataactatccggttgcaccggaggttttctgctgtctgtcatttaagccagaaggaatatgaaccatgaaagattacaagcctcgttacgaagagctttataaatattaccagatctggttgaccgattttacgaagctgacggtcagatcgggtatgtgccaccaaaacatctaccaccatcataccctgacggttggcagccttaagtttccgggagaggaagaggttattgctattgtcccccagtgcctgcaccggattatttatggtagagcagcagccccactgactgttaatgaagacctgagcgtcagtttatttacccaggagcatctgctggctcaccatcccatgctggaggggattttgctgtctgagtgcgtgcgtttaaaacaacgcccactggcaaataagctcatcagtttgttccgccaattcagcggtagtgagctgcgtctgaagctggtctggctgtgctggtacgatttgatgctggggaattgccttgatgactggaccgacaacctcaggttcaaaaaagacaaagaaatggatatctggatcaatgaccggcaggctgaaaaccctgcgctgaccagtctgatggacgagtatgtctgctttgcatggcggacgacagctgaaccactgagttaggcttcatccatagtcctgcaagggatttgagggttattggggagtgaaaattaatttaggttaattaatataattaataggcactccctttttacaaccatccctcaatccatgcagttcccccagccatggcccttcctgaaggcctggtgtattccactggctggccctcgccagcgctaaagaaactcatcctatgcaaaataatcaacgatgggagccagactggtttctacagtcactcctgaacaaccatatcgacaaactggtagagcgctattcctgcctgcgggcattccgaatagatctgttttaccaggatcataccgctaagtatttcctgcgggatcaccagcagctcggatgggatatccgaaagctgatgaaccatgtgatgcaactcgaagcgatggtcggtttcttctgggttatcgaatggacagaagaccatcactatcatgcccatgtcgtgttctggctggatggtagtaaaactcagaatacctatccttgggcgcagcaggtcggtttgtactggagtgatatcactgaccgggatggctggtatcaccggtgtgagtttaaagagcattacgaagccaacatcaacattccggtacgttacagcgacccggacagtatcaccaacatccgtcaggtactggcgtatatgaccaaaattcaacaaaaagaggggatgccgttgtttggttgcaacgaagttccaccccgcccaccgacaggtcggccacgacgcaatctctgagagttttttacgtcacaacgccttagtgtgacaaccaaagaacagtaacgacagtccacacgggcttacttcgcttcctttgataacacttaactaatccgccattcactcactgactatgctgcccgtaccgggacggctgacgcctgtgtgttgtctggcggtaaggagctgtactatgtacgccaaatctttcctcgctctcgacgggaatggtcgtctgaccggtgcccgtactgcgcagaccgccccttacgatcgttatacctgccacctctgcggtagcgtgctgcaataccatcctgaatacatcaacgaacgcccgtggtttgaacaccggcccgacgatctaacggagaacgggcgacagcactgcccgtatgtaaatccagtggaaaaggaagtaagacgaattcttaagttgcgccgttacgtggcggatgctcaacccgtgatactcaggactgactggcactgtagcggctgcggcaacaattaccacggtgaacgttattgcgtggcatgtggtactggcgacttaagccatatactggaagaggccccacgatgagaatgctgcttatcgttgacttcacaaaacctgcactgatcttttcgattaatgaatatcactcatagtcccaatcctcctgcctgtgattatcagcgagcacaaacccgttaacatccccctatctcttcatgctcaacggattaccatgcttaatcaacaggcacgaactcactcaactacagtaaaaaaaactggtctatcatttttgctcattctgagcgccctaatggctgttacctctttatcaaccgacatttatcttccggctatgcccgtcatggcaaaggatttacagggtgaagcagagctgacaatcacagggttccttatcggtttttgcattgcacaactgatttggggaccgattagcgatcgttatggtcgtcgactgccgctgtttatcggtttaggtctgttcatcgtcggctcggtgggctgcgcgttatcaacggatatcgtgcaaatagtcttctggcgtgtttttcaggcgttaggtgcctgtaccgggccgatgctggctcgagcaatgatccgtgacctgtttagccgcactcgtgcagcacaaatgctttcgactctgatgataattatggccatcgcgccgattgccgggcccctgatcggtgggcagatgattaaagtcacctcgtggcatgccattttctggctgctggcgattatcggagcattaatgctgatgtctttattctggctaccggagacattacctgctgaaaaacgctcacaagcctccgtaatcaaagcttttcacaactactatgccttgctcaccaacgccagatacatgcggtttactttgtgcctgacgttctattacgtcgctgcctatgcgtttatcacgggttccccgtttgtgtacatcacgtacttcggcgttgacccgcagcattacggttggctgtttgcagtaaacattgttggactgatggcggtgagcatggtcaacagacgtctggttcaccgctatccactggaagcgttgctcaggaatgccgtattcatcgccgctattgcggcaatagtgctggcagtcaccaccggcctgggcgtaggtggaattaccgtgattgtcggcgctgtgttcgtgttcttctctatgaatggcatcatcgcggcgacatccacggcttgcgctctggacgcagtgcctaatgtggctggctccgcatcggcgctaatgggcgcgttacaatacggcagcggcatcatctcttcacttcttcttgccctgttcagtgatggcacaccatggacgttgggctggataattgcgttgtttacagcagccagcgccctgatggcactgaccgttcagataaagaaataaaacgtcgttattgatgccagacgacactttcgtccagagatacccgcccttccctgtaactcagggagggatgcgttttatctgggatccccaatgaaataccgtaaagcagcctgaaaccttcaggaacattcaatagcctacgcaccgtttgggcaaaataactcagcactgcctgtggaacacctgcgtaaccgcgagctgccagagaaagcaggaatgtctgcgcatacataccggcgtctgaggctacgcgaacgttgtcccctacagcaggaatgaatagcagggcaacatgaggcgcgccgaaaaatctcacattacgctcgaccacttctgagcgacttaagttatccccccgcgcaacgcccagtgcctgatagtacgagcgcccctgctccgaagcccgttgcctgaatggctagggataagcttctttatcaaacgtaaaatcaaggctgtagttcccagccctcagatcttccgtcagtgcgtggcttaattcacgaagtttatctcctgcaacaatatgcagggtccagggttgagtattgcagttggatggtgcgcattgcgcttcgagcaaaatgtctttgaggatatcgctggggatgggagatggaagaaaggctctagccgagtatctgttttttactacctcactaaatgttggctcttgcgtactcatttgcttctccgcctgaaagtaatttgaagtgaatgattcactctctcccgatccatcctgtcacatcaggcccatcgttttcattcccggttccagattaggtctatgaattccattcatagcgtctatttaagcagcgtaattatctttaaccccaacttcgttaatctgggtctatcgcgtgaacacgcaagcggaaaatggctacagctgatggatataccccagcctgcgcggctggggcgtcattggaggctaactaaatatttttatcgaagaagacgtctaacttttgcattgccttatcaacatattttggcacccaatacgtttcgatatgggtagcgccatcgatcaggaagagttctttgtccttcgtaccggtggcttttgcgaacgcatcttcagtcatatagagcgtatccgcttttgtaccggcaatcatcagcagcggtttattgatgagattgatatggtccgttacgtcaaagctcatcaaatccagcagactgctggtggtgtatttaaacgtggagttcgggtgggcgtgggttttccagtagtactcgtagccctgacgatataaggcaaaaggtaatttagcaatctgttcatcagtcaggttggcatcgccggagtaaagcacttctcctcctgcagcttcctgagcgcgtgcctcagaagcctgctgaagacgctgctggatagtatcgagctgtgaatcctgcataccgttgcggcgcacaaggcctgaattaaacatgctgatggttgcgatcgatttgaatcgtttatcagtttcggcggcaacaagtgaatacccgccacctccgcaaatgccaagcagaccgaggcgggaagtatcaacgcccggatactggctgatgtaatcagccatgccatgaacatcctcgatgcggttagcgggtttatccacgctgcgaggcatcccaccgctagcgccctgataagccgcatcggcggtaatcgtgatgtagccctgttcggcgagacgctgggcatacaacccggcgacctgttcttttacgccgccattaggatgtgccaccactacagcagggtattttttggcgggatcgtagttagcaggggtatagacattcgcagcaatctggatgccatgcagatcgtatttcacggggtgaatgttgaccttgcctttgacgttctcagtaatggcaccgtcataggccagtgtgaatggattttttttgtaatcagccgcattgactgaggtcactccagccattgccgtgagtagcattgcactgataagcgtgaatttcatggtctctcccgatgagtgtcggcctggttattcaggctcgcggaatcaaatttgcaggctcagattaggcggagagggctgtcagcatcgtgacagggaaataacatttttgtcaggaaacagactggaatgggtaagagttcctgacaacgctgtcaggtaaccgtcagctttatgttggcaatcaggaggcagaatggtctctcttaaatgagattcatgttcagttttctgagaaaaggagcgatcaatgaaaagacagaatgccccaacaatgccagagcggcgcaagctattagtcgccggggcgggtattgccgccgcctcgctgattccgcacgtatcggcggcgagccaaacctctcaggtcgattcatccagacaaaccagccaacgcaatgctgctccgggcaagcgtaaactcgggaagctggaagtttctgccgtcggtttgggtgtccagaacatgagccgaaaatacgacacgtccgttccctggcgtcccgagatgatcaatgttatccacggggcatttgatgaaggggtaacgttcttcgatgctgctgaagcctacggcccatttgaagtcgaaaaaatcctcggggaaggcgtcgccccattcagggacaaaatcgttatcgccaccaagtttggctggaacattgaccaacagacgggtaaacgtctgccgggccttaacagcaggccggagcatatcagacaggtcgtcgagaacatgctcaaacgcctgcgtaccgatcgtatcgatttactgtatcagcaccgggttgatccgcagatcccaatcgaagatgtcgccggtgtggttaaagatttaatggatcaagggaaagttctgcactggggtctgtctgaaatgggcatcaacacgttgagacgcgcccatgcagcattacccgttaccgccgtacaaagtgaatactccatgctctggcgcggccccgaaaagcaggtacttccggtgtgtgaagagctgggcattggattcgtgccatggagcccgctcggcgtgcaatttttaacgggctggattgatgagaatacccggttcgctgccggtgatttccgcgcgacagaaacgcgcttctcgcctgataacctgccacacaacttacagctggtagcgctactgaaatcctgggcaataagaaaaaatgccgcaccgggtcagattgcgctggcatggctcctggcccgtaaaccctggatagttcccatccctggcaccaccaataaagaccatatgctgcaaaacacagcggctaccggcgtgtcgctgaattccgcagaattgaccgcgctcacccgctcactggatgccatcactattcagggtcaacgtctgccggatgccgtgcaggtttattccgatgttgaagcaccgttgaaaagttaagaggaagtcccgttatgcgcctgttgttagtcgaagatgaagaaaaaacgtcaacctatctcaaccgtgcgttgagtgagtccggatttacggtagatgtctctgcagatggagctgaaggtcttcattacgcgctggagttcgactacgacgcgataatccttgatgtaatgttgccggggatggatggatatcgggtacttgagggtgtgcgagcagtcaaacagacgccggtgctgatgctctctgcacggggttcagtcgacgagcgcgtaaaagggctccgacttggtgctgatgattatcttccaaaacccttttcacttattgagctggtagcgcgcattcaggctctggtgcggcgccgtgcaacggatggagcagatatcacgcaactgcaaattcacgatctgcatctggatctgctggctcgccgggtattccgcgccggaacaaggctggaactgacagcgaaagagttttccttgctgagccttctggcccggcatcagggggagattctgtcaaaaatgatgattgcggagcagatatgggacatgaattttgacagcgatgccaacgtggttgaagtggccattaaacgacttcgggccaaagtggatgctccgttcgatatcaaactactgcataccgttcgtggcatggggtatgtccttgaagtgcggtccgaataaatgaaggggataagcatgcctgagcgttccatctccgttcacctggcgctgatgtttgccttatccgcgctgctgattgtatccgttatcggtatcctgcttagaagctctttgcatgattctttgcaaaagcagatgcacaacgaactgttgttccgggaatcattaatgagtccgtggatcaccgcacgaacctcggctgacggctggtcactgcttgccaataaattcaccgtgttaaccaattctgaaggtgaacgcgttcgctactggatagtgagcgataacccgcacttcagtatgggggggacaccaccagtgggtgttcagtggtcttctttgcaggaaggttttaataaagtgcccggtgcatcggaaggtgcatgctcgctgttcctgctagtgaaaactatccccgccaacggtgagcggcctgagttgcgctatgtggttgccatcgactccacgccgtacatgggcacactcgatgcgttcacgcgtacattgctgatcattaccgcgctgggcgtcgtcattgtcgccttactgggatacgtcgtctcaaggatcggtcttcgtcccgttggggcgctcagtaaacaggcccggcatcttgctccagggaaccatggccagcgcctgaataccgaagcattacctgacgaattacagcaattagcatcatcttttaatggtgtgctggaacggcaagagatcgcctggcgacagctcgaaagctttaatgccgatgttgcgcatgaactccgtacaccgctgacaaaccttatcggccagacgcaactgggtctctcgcgccgacgttcgcaggatgaactggaagagttattgggttccaatctggaagaacttgaacgcatgacttcgatagttaacgacatgctgttcctgtcccatgctcacgcgggtgaacatgcttcccagcttacgcaggtttccctgcgggaagaaaccctgaaaacagcggagtacgttgaaccctcgtttgctgaaaaacagctctctctggatgttgagggcgacgtcactgcgcacattgaccggcgactgttccaccgatcgctggctaatttgctggaaaacagcgcaagacactcaccattcaatagaacggttacggtacgcttaagcgaaaaaaacaatcaagcctgtgttgaagtttcaaacccgggcgatccgatagcatcagagcacttacaccggcttttcgagcggttctatcgcgttgacaactcccgagccaggagtgatacccatcatgggctgggcctgtcgatcgtgcgtgccgtcgctattatgcaccggggagatgtctttgcccgtagtgaaggcggcatcaatacatttggcctcacctttgcgatacaagcggataaagcggcgggcaatgctcaatccggcgctgagccgggacccgggttaactgacagaattgtcaggggggcgtcagcctgacgtcattactccctcgataaaatcatcgcaggcaatcccctcttcattgataaggacgctttgcatgatcggacatttacgttacctcgggctgttactgcccctcttcacattttcatcctgggcagcggagcaaaatcccgctgtcaatatcgcacccgcaggaagtcagaacgcggtgtacgggccagccgagaactttaccggtcgcgtcagggttgatcctctcttcaaaccggataacgacatccctgtttccggggcttatgtcacgtttgaacccggcgctcgttccgcctggcatatgcatccggcaggtcagcggctgattgtgacctctggtgttgggctcacccaacaagaagggcagccggtgcaggttatccgcgccggtgacgttgtctcttgccccgcaggggtcaaacactggcacggggcggctcccggcagtgcgatgacgcatctggcgataaccgggattgtggatggcaaaagcgttaactggatggagaaagtgacagatgaacaataccacgcccattaaagcattagcggcagcggtactgctgacctttggttttggcctcgcggcaaatgctgcccccgtcaataaaggagcctcagacatgaaccacgaacaatcggtttcagatatgctgtcagcccgccaacaggccatcccgttgattgccgcatcgatggccagcagtcagatagataagctgaatgcagccctgaatcagggtcttgacgcaggactcacgataaacgaaaccaaagagattctcgtccagctctatgcctacacgggcttccctcgtagcctgaatgcgcttagtgaactgatgaaggtcgtcgaagcacgtaaacaacgtggcatcgaagacgttgagggtaaagaaccggttgccccgatccctgtcggggatgagcttcgccgtgtcggtaccgcaaaccagacgaaaatctctggcgctcccgtccagggcccgctgtttgattttaccccggtcattaaccagttcctgcaaacgcaccttttcggcgacattttcgcccgcgataacctcgactggcaaagccgcgagctggcaacggttggcgcattagcggccacgccgggcgtcgaatcacaactgctgtcgcatacgcgagccagcatgcgggtcggcctgacggcagcgcagctgcgccagctggcacaggttctgcgtgaagatggcgaaagtgatgcagcaacgcgagctgaaaaggcgctgcagcaggcgctcgcaaacaattaggagtgggttatggagcatgatcccaaccgcagaatgttaatcaccgcacttgccgggctcacactggcgaacgtttcttttgcctcagctgcgaccggaaccgcaaacgagcagggtaaaagccgtgttctggtggcgtacttttcccgcagcggaaatacacgggtgattgcgggcgtcattcaccgcagcctgaataccgatctgtttgaaatcgaaccggctacgccttatccggaagactattttcagaccgttgaacaggcgaaaaaagagcgtgagcgaggcgtaaaaccggcattaaaaaatagcgttgcagatacctcacgctacgagaccgtgtatttaggctttccgatctgggggaccagcgtgccgcctgtagtgcaagcatttctcagcagccacaaccttgcgggcaaattactcatcccctttattactcacggtggctacggtaaaggagacagcgacgacatccttgccagtctcgccccaactgcgcgtcgggaaaaaccgctggtcattgaatgcgaccaggagcgaagaaccactgaaacggtaacaagttggttagagacaatacgcagttaatcgtccgcattcatgagtctgccaaataagggcaatcaggggtgctaaataattaacgctgactactcagatatgattgagcggcaaacataacagaggatgtaatcttgaagacaatcttaaaaacgctggccatctgcgtaatggcgggcggcctggtggctcagtcggtctatgccgagccgctggtcattcaggaacagggaagcttttctgctggtggcactatcatcaccgcaccaggaacatttgatgcaaaaaagccgctggattcagctggccaaacctatcatggcgatcatgcctcagtgttctaccaaatcccggagaatccgcataaataccctatcgtcatgctgcacggcgcaggtcagttctcccgtacctgggaaagtaccccggatggtcgcgaagggttccagaacatcttcctgcgtcgcgggttctcaacttatcttgtcgatcagccgcgtcggggcagcgccgggcgcacgactgtagaaggtactgttacgcctaaaccggatgaacaaatgtggttcaaccagttccgcgttggcgtgtggccagagtattttaaaggtgttcagttttctcacgacaaagaagcactgaatcagtatttccgtcagatgaccccaaataccgggccgtttgatatcaatgtcatctctgatgcgatgtccgccgtcgtggataaatccggcccggctatcctcttcacccactctcagggtggtggaccgggctggtacacggcgatgaaaaacaacaaggtcaaagccattgtcgccttcgagcctggcagcagctttgtcttcccggaaaaagaactcccagcccctatgccaagcgcgttcgacacgctgaagggtgagcctgtgccaatggagcagtttatggcactgaccaaaatcccgattctgattatttacggcgataacataccggataaaccggtagccatgcccgcgcaggacagctggcgcgtacgtctggcgatggcccgcgagtggcgtgacgtggtgaacaagcatggcggggatgttacggtgacgcatctgcctgaagtgggaatcaaagggaatacccacttcccgttctctgatttaaataatgtgcaggttgctgatttggttagtaaatttttgaaggaaaaagatctgcaatagagaaagctagtattgagccttcatgaatgaaggctcaatacaaacatcagttttatcaaaaaaataaaatggggacgagaaggtcggctttgagcgaaaaacggaccttcaaatccgaaccggtttaattgattaaccttggctgtcagtcaacccatcgttagcatgaatccgatcgaaaattccttatcgcattttttacaaatacgcagtggcaagaaagatagactctggctcgtgacaagtagagttgttcatttgtataaagagacttcgccttcaggacgcgttttgaacctgcgatgcatccacaggtattgctcaggggcacggagaatttcacgctcgatgatcttgttcatataagccgctgcggcgaccttgtcttcccctggatagcctgacaacggattgctgatatacatgtgataaccttttttatcgctacgtcgaatcatgctaagtgtgatcaagtgtgcaccagcgagttttgacagagcatacgttccgttcgtcgtggctgctttttttaccgagaaaaaaggtgcaaaaacgcttcccttagacccataatcctggtctggtgcaaaccacacggcttcaccggctttcagcgcatgaacaaaaccagataaattacgtcgatcaatcatcgctttatttgaacgcatacgcccttttgtctgcacccattccattaatggattattgtgtgggcgataagttgccatcataggatgacataaacccattactcttccacacaattcaagggacataaaatgaataccgacaactattactcctctggtcgcaccggtcaggttttcaagcccttcgacatcaaaccattttttgactctcacatcgctccagaaccaggccattcctgtttccatcagtcccagcccgagagaaacaaagtttttattgaccatctggctccgggaaaatggtgtcatctcgggaaagcagagttcgatatttctaatcgcaattccttcccggcgtttcagaaagggtctggatatttttccaaggccagagcccagaatgtgtaaaaccgggtaaggaagttgaacgagaagccacagcagacccaaaccagaccaggtaagccagtagcgaggatggagtaaattatgagtaaaagtctgtgccataaatttccttaatgctaatgaaggttataacgcaaaaggaaaataatgagaaaattcgtctttagcgatacattttgttttagacagtttaaatctgtctaaattcagaaaaacaaataattttgcaattactggtaaaggattttaagagtcaggaatgaattgtaagccagcaaagttatgccgtcacaaattcatgggcttatcattgatattcaagaaattgtcttcttgattcatcatcctcaaggtactcaaaagaaagaaggcgaattttggtaagtttatagaaccactcgcaatcgtttcgttgaataatttcgcctggtttgaaacatatgcctgatacttcccggataatcgcatatttgccattactaaacctgaccctgtggatacagaaaggttgaccggcctgcccatgacagcttttcgaaaggatatgcccttcaataaaaacagattttttagatttcatcatcatgccctcgacaactgcagtacaggagaaatgttgtcatttcccgacatcatttacgttaagtggcagaagctgatcagccgccgatacaccagcattctgatggtttgaacaacagtccgcaggcagggcactccagaactgcatcttttcttagtttacctgctttctgatcagctctgtatgcgcataccgggcaggcaacatgaaccgacctttctttaaagtgcctgagtccttttgtataagacataaataattctctgagggatacagtaattattatacgctttaatataaaaataactggcttaagttatgttaaattatgactaaatcaagatatcagatattgaaaattgaacgtctgatttatgatacaataccctacccttccgtgagaaatttatgatgaaatcagaagacacccttgactggtacccggcacagctaccgccagtgaaaattattcttggcgaagccgtgctggctgtgggtaaacagggccgaccgattaatacccgaaccttgctggaataccttcaggtcatgcaggacaaacaaaaaagaaaggatgacaaaatcgctatgcagactgcgattgatgttctcagggataatcagcgcattaacggcagacgttaatgcgcctccgggatcgtgtcagttctgaatgatctcaaccgtatggttttgtccatcatcctgcagcggtattctgtcatcagggaggagaacaccatccagtgtcacgcgatattttacgttgccgcgtgagacacttatctgataatggctttcgccatattgataggccatagaaaaagacggccactcatccggtaaccgggcatgaacactaaagtcagtaccggaacgttttatccccagtaattcctcagtaagtaaacgccaggcccagcctgcggaaccggtataccagctccatcctgcacgtccggtatggggagcgacgctgtagacatcagcactcatgacataaggctcagctttataaatcccgaccaagcccgcattcagagtatgatttatagggttgagcattgaccagagttgccaggcacgtttggcattccccatccgggaaaatgccatcacggcccagatggcgccatgagtatactgccctccgttttcccgcacaccgggcaggtacccctgtatgtaacccggatttggaccgtgtccatcaaaaggaggcgttaacagtttgatcagtcccccttcgttatccacaaggtgcttatccagcgcctgcatggcctttgtgcaccgtcccgggctcgcggccccggacaatacagaccagctttgcgcaatcgcatcaatccggcagtcctgtgaggctttcgaccccaggggagtaccatcgtcaaaatatccgcgccggtaccattcactatcccaggcgtgggcttcgagattgctttgcaggcgcagagcctgtgaacggcacatcgaggcgatactttcatccagccggcgctccgccagcgcggcaaaccgttgcaaaatgtcgtacaggaagaagcccagccagacgctttcgcctttgccttcgatacccacccggttcatcccgtcattccagtcaccagcccccatcagcggcaggccatgttccccgaaccgcagcccatgtcgaatagctttgacgcagtgtaaccagagtgtctcttcggtgccgctgatgaccggcgtgtcatagacagactcttcaccaggctgaagcgagcgtccctccagataaggaacgcgtatttccagtgcatccatatcccctgtcgtttccacatagtggcaaacggcaagcggcagccaaagatagtcatcggaacagcgggtacgcacgccgttgccgtgtggtgggtgccaccagtgctgcacatccccctcgataaactgccgtgatgcacagagtattatctgttcacgcatccggtccggagcagcgtggctcagagccagcgtatcctgcagctgatcgcgaaaaccaaatgcaccgccagactgatagtagccactccgggccataagacggcaggcgaccgtctgataaagcagccaaccattaaccagtaaatttacggacgtgtcgggggtattaactacgattttatcgagaacattgtgccagtgattatgaatccggttcagctcctggcggaccgtatcctcgttcatgtagcgggccagcgtctcctgagcacaaacatcattctcctctgcgccgaggataaaaataaacgtcctctggtccccgtcaattaatgtaaccgccgattgcaccgctccgcagggatccagaccggcccccgtcttaccagaaagcttttgcagtttcatggccgaaggggcgtgaagggaaccattacggccaataaactcccggcgatcccctgtcagagaacagtcattaccgctgacggcaaaaaatgcagttcggccgccaccattatcaccataaaagttattcgcaagcaccccgcagccaccgggcgttctggccacatgtgtcacaatgtgaggggctgagcgcgttcgtgtttctccgagcgtccactctacatagcctgtgacggaaagttgacgtgtccgtcccgaggagttactgagcgtcaggagcaccagtttaaccggatcttcttcagcaaccaggaccgtcaactcgctgtctataccactctcacgatgggcaaatacgctgtagccaaaaccatggcgggtcaggtagtcaccgtgtccgcgaacaggtaaagccgtcggcgaccagcactccccgctctcttcatcgcgcaggtaaaatgcctcgccgctgcgatcgctcaccggatcgttctcccacggcgtcaaccggtattcatgggcattctcataccaggtataggcctgccctgcctctgagatcacactgccaaaacgagaatttgccagtatgttcgaccagggagccggtgtaagcgcattttcccgaaggacgatctgatactcccgcccatcctgagaaaatccaccgtacccattgaaatggcataactgactggtatcagggctccagtccgtatgttgattacgctcgcgcacagcacgcggaatgaatgcccttgccggcgatttcagggtatgaatacgctggttaagctgctcattaataccccctgcgcggtcatcaagataaagacaggccacgctcatcaaaagcaacttatcctcagcggagagatgctcaccgttccggacaaaaagcccgccctttttatccagcagactggcttcagacccggcataaattaactccataatctgattttgtaatccctgctggtagccgccggggctgttattcaggataaccaaatcaacatccagccctttctgtctccagtaacggtgtgcctgaatcagtgtggtcactgaggtgatactttcctcgctggttatactcagcagcactatcggcagatcccctgaaattgcccagccccacagtccggactggccacgccggttgcggcctatcgcctggccttcggcgcgcagctcctggacagggtaaagcacagcgctggcgagactattgaacaacgtggcatcatcttcactggcgttcatctggcgcaataccaccagactgtgagaccaggccagttcaaagacgcgatcggcaatagggtaatcgcgatatttctccagcaacgccaggctctgctgacgggtctcgctgatgccataaatgatatcaatcgtaaccggctgccctggctgcagaatgatggcgttgcgaattgccagtatcggatccagcaccgagcccgacgtgttgcctagcatccctcccgtctctattgcctgtgcattcgcagggtttctgccacgtccaataaaccttgccctgtccgtttcaaacgacacgttatgtcggttatcgccgtgcaccaccatcatgtgaaacaggcaagggcccggttcatccggtgagcgcgggcgccggtggcaaagaatagcgtcacgctcaggagccagctcagtctgaataaacaaattgctgaatgccgggtgtgccagatcgctggcatcaggtgccagtaccacttcagcataggttgtcagctccagagagcgaggcttacgaccacgatgaatcagtgtgagccgtcgcaattcaacatcatcctccggagagatcaccacctgagttttgacgctgagtccccctaagcttcgtctgaattctgcccccgcatcggtgaacaacacttcctcgtcttgtccgctggtgtagcctgttggttgccaagtattgctccacacatctcccgtctgggtatcgcggatgtagcagaatgctccccagttatcacgggtggtatcactgcgccagcgcgttagtgcaatatcattccagcgactgtaaccaccgccgcccgcggtcaacatcagatgataatggccgttggacaggagttgaatatccggggagggggtatccacgctatagaaaatacggggttcatagcgaacgggtttgaccatgccctcatgagattcaaaatgacggcgcggactgtacagatcgaccgcatccggcacgcgctcctgtaacagcagactcgctgaccggaataccgtgctggacataaagcgttcagtcatgggggcgtcaagcagcacatgagccagcgcctgaaatgccataccctggtgatgcgccatccaggactgtaccaccgcatagagctgaccggttgcaagacgtgagggggtatagtccagcgcttcataaaaaccgtattctccgcgtgcaccatttttttgcagcctgaacaggttctcacaggctctctgtggggaaaccatcagcgccagcagcgtggcgtaaggagcaacaaccatgtcatcggcaagtcccctgcgtagaccgagccccggtacgccaaatgcctgatactgataattatgctgaacatcaaaagcatgatagccagactctgaaacaccccatggtaccccgcgttctttcccccaatgaatctggcgcataaccgccgactgactcatttcatcgagcaggctgccgggccaggtgggcatcaccagattcggcatcagatattcaaacatggatccgctccatgacatcagggcagtttcattatcaatcgtggtaaacaatcgacccagcgcgtaccagcttttaagaggcagctgattagtcgcaatggcaagaaaactggtcaggcggatttcagacggcaggagatcgtagtggcttttgtcaggcatattggtgtcacagttataaccgacgctgagcagactggttgcttcactgtacagaaaggcgaaatccatccgggcatgctcatccagccgctgttccagctcggtgataatattgagtcgcattcgggcctgctccgccactgacgccggaggcgttcctgtaccggttaatgtcggacgggcaagctcgctcagcgtcggcagcgtctgttcattccaggatgcaggcaaccagccaagcaacagagaccactcatggcaaagctgaaccagttgatgctccagatgtccagcccagcgcatctgaagaggagatccctgatgacatgcgctggtcagatggttgcactgggtgcgcatgcttttcagttcgctgaaaagcgcctgcggagagagcgacacagcgttcaggcaatgcttgcgcagcagtctcaggctgtcaggtgggttcttaccccactgtttttccagaatatccagcgtatcgttcagtcctgccagtatctgttggttgcttaaaacaggctgatgacgcatggcggacaggcctgcacgcagggtcaataaatgcccggccatattgccgctgtcgacgctggagatatagcgtggacttaggggggccagcgtacgggtgtcataccagttgtagagatggccccggtagtgctccattttatccatcgtgtcgagcgtgagcgacacgcgccggagcacctctccgccaggcaggtagccaaagtcccatgccgtcaggttagccataagtgaaagaccaatattggtaggagaagttcggtgtgccaccgtcggttgtggtatttcctgataattatcaggcggaagccagttctcttttgctgtggcaaatgtttcaaaaaaagcccagatttcacggcttgtctggcgtaacagctgtttttgttcctgattaggcgaaaaaaccttacgcacgggctggcgactcagccagctcatcagcagcggtgccacacaccataccaaaccgatcggtaacgcaatccccagcagctgtggggcaaattgtccggtcagtattgtcagcgccacgccaccggcaacgttcagccacatcgcctgataaaaacgtgcaacagtgggtctggcctgactgctgtcctggctgtggctgacccactggctgaggtgacgcctgcttatccccagtcgccatagcgtcacggcgatcgctttcagcgaatatccggcttcgtgcggcagtatcgcaaaattaaggctgatacctgacagacgctttagcgcgcccgcccccaccattaacagatgcggcttcacgcggcgacgcagaggtttatgcagaaggtcgtggctgatgcagaggatggctggcaacagccatatcagcaacagtatgcccagccagtaaaccgggttgggtacccaaagcagagcgaagaacagcaatatcagtaaggagggggcgaccagactgcgacgtagattatcgagtaatttccagtaagaaagcgcggtcagcggattcctgacccgggttccatcggcttttctgacgcgtggttttagccagttaagcagttgccagtcaccccggatccagcgtgaacgtcgtgcaacatccgacagataattattagggtactgttcgtacagtaacacctcgctcagcagacccgaacgtgcatagcatccttcaagcagatcgtggctgagtaccagattttccgggcagatgttggtagtggcctgcataaaaatatcaacatcgtaaatccctttgcccacaaacgagccttccccaaagagatcctgataaatatccgaagacatcatcgaataagggttattgcccggtacgctgctgcgcagggctgcgtaacgcccctgaccgttgcgtggtatctcctccgcaagaccgggctgtaaaataccgaatcctttgacaaccctctggcgtaccggatcatactcaggcgtattcagcggatgcgccatcgtcgcgacgagtttgtgtgccgtatcgcgcgggagcaccgtatcgctgtccagggtaatgacgtattttatgtgacccggtaaaaggtgggcaggcatctctgcaacgctgacgaattgcgttccgggatggcgcaaccagctgttcagtaacgccagttttccccgcttgcgttcatagcccatccacgctccttccgaggggttccattcaggctggcgatgtaacagataaaaacgtggtcggccggaggggtagcggcgattaagcgcctgcgtatcggcgatagcctgtctgagcagcgcgtgactttccggcgagggttcattttcagaatcagcaaaatcagtgagcagcgcgaacctgagattttcgttttcattccccaaccagcagacttcaagactggtgaggagctggctgaaactttcgtggctggtcaacatgcagggaatgactaacatggtggcactgtcagcgggaataccggctgaaaaatccatccccggtaagggtcgaggaacgcgaaaacgggtggttgcatcactgagcaaatcgctcattaactgagttaatgcgataatcagaggtaatatcaccgcgatcaatagccagtctgcgccctgcatggcggtttcgtgcaatattgctgcggtcgctgcggttgtcagcaacgccaggcttccaagccatgacagcagggttattctgttgaaactgtgccgcaagcgtatgagccttgaggcgtctgccaggagatgaatatccagcgcctgtcgaccttcgcccgcaagataataaccaacatgatgttcctgtgtatcgggcgctttttcctctgaaagcgccagcaccttctcagcaacctcaggctcgctgagaccgctgtccctggccagaacctcaactacgtgccggtaatgatcccgggtattgaagtgcatccggggatagatgccggcaggatcattgcgtaatgcctgttcgacaacgcttatcgtttcggcgaaatcagcccagtccgtttcactcaataaacgcaggcccgcgatgctgttactgacggacagctggctggcggcaagctgctgattgaaactatgtatgagaacgtcagtggtgatcccctgttcccgaaggcactgatcaacccaggtcagaggtaacgacagcgcgttgccatgcccctgcaggcgccgcaccagctctgcgacaaacgcactggttaacggaggtcgggagcgcgccatatcggcaaccaccatgattaaatcaccaggcgcactctctgcgcattcgacaatccttgttatccacgtatcagcaaggtttctgtcctgctgcgcttttatcacttccatactgatacgacgaagattttcaatcagcgcaaggcgcagcattcccggtaacgcccagacttcacccagcgtcagcggcgtcacctgttgataggcagtgagatagctggtcaggctggcggcatcccagcggccatcgccgtgagcaatggcctctgatgcaatatgataaattcgtgggcaattcaacggcgatacaagcgacggaagacctttgccaaagcttttcggcagatgctggcggacagtgcggatttgttcctcaatcagataataattgtccagcagccattcaccggcgggcatgatactggtctttttacccgcgttaagctcatagcagttttgggtaatgacggcctcattgtcgccaagccgtttcagaagataataaggatgcctatccggtgatactttatgagtccgcgccagcttctggccgtagcgttccatctggacggtcgaaaagagttctgaccgcggcgagctttcaccggcaggattgttcgccgaaaacgttatgttttcggcagcattcatcagaatacgggagcggttaaaccacgctctggggatcattttcatagcattgctctgatgcgacgttagcgcgcaggagcagttgcgaaatcagttcagaaacgttctctcaggatgggcgtcaggcatcagggatttaacagctgccggaatctaacataagtataggacatgagctctgttctgcggttttggtcgagctagcgtcgggagataaacagagccttacatccggggcaaagcatggtctggttgagccggatttttgacaacggttgtactgattttaagccacaaacaggacaggcagcagtggcagtagacgcactgctgaagaatttcattgcgtaattgataacagacataaccattaacctttcaatgaatgagcttcaccgtaccacatgtggttaagttttaatctatctattttgacacactgaaaatcaggaaagataaatgttcgcagccacaggccccctgagaccgtttatccggcaaaactctatgcggcttccagggatgagtaattctgattcgcgagagttaacggctgaaatgtgaagcagaacgtcttttcgtccatcagatgggatgatgaggcctttaccactaagaatatcaaagcttttgacaattcctgtcattttatgggacaagtcaattccttattgaaaacacgtaaagactatacattgaaaatggcattcagccacttttattttccctacaggacctctggacggctaaaagataatttgcttatatcgattccctgtgccttaatgaatcccatcagttcgatgtactaatgaaagttagaaattttccgggcagttctcattaccaggcgctatcgttgatatcccctcttttgagtccatatgtttaatcctatacgtttactatcaatacaatcatgtataacggagtcagtatgacctctagaattatgggcctggttaaatggtttaacgaagacaaaggttttggcttcatctctcctcttgatggcagcaaagatatctttgtccatttgtctgcacttgatggcgacaactttaaaactttatttgaaggtcagaaagttgaattcgccattcaccgcggagacaagggtcctgctgctgcaaacgtaacactttgcgataaataaatcattgtgggtctgcgataactataaaggattattcctgagtagacagatccataacttaaatcagatgaaagtcgtttattcataatatctgatcagcatatttttcaaaattatgagtatgctaaccgatgtgatgaagtgcagtactactgcataaaaagtctaaaagcacaaactaaccacatgttaaataagaagtgcgtaatggctttgaccttaatggcatctgccagttaatatccacgagagaacagggtaatagaatatgattaaagtccttgttttctttaatgctgaatcctgtaaagtcatgaccgttctggaaggtatatcctctatcaggcaggaatatccaaacggtgaagaaacacatcttcggattatgtctgcaggttttccttccttaactggcgatcatggtattgtttacgtggctactgacagggagttaacgtcacaggagatacttgatgcggccaggaaatatttatagcatttttgtcatgctctctgctccacgtttaattgcatgcttaccctatttatcagaatcgaacaaaaatgagttgaaaacatttatggcctgctaacagcaggctttttttttacattacacttttttagaaacacctctataaagagagagtaattcgctaccttctgacaaaatgcaggtgtctctcccctgcgtgccatcttgccatttgtgaaaaaccttgctaagtggcggcgctgtctctcctcattttaaatctcatcaggtgtgactgaagcaataagttatgaggatataaaaaggctctccggatgactcctggcatcatagttttaagtaccttcaaaaacgcatggacatttcgtaggagttgtaatttagttcttacacattcttcttaattttttcttgcgacaagagatttatataagtagtctaaacctcgttaataacaatatgtcccaatcgcattaaaatgctcagtaagaaaaatcgggtcgatgagcaaccgtcgacattggtatttgctgaacaacgaaaaaactttaaaaggtctctttatgtcagatgctctaacacagttaaacaatatccgtaccttacgttctcagactcgtgaaatgtcattagatgtactggaagatgttctggaaaagtttaaaattattcttatagaacgacgagaagaagagacattacgtcttgcaaatgaaagtcagcgccgcgataaactggaaacacttcgtcagatgatgcttgatgagggtatcgacccctccgaacttttagctgctattggctctccgggtaaggctaaaaggacgcgctccccccgccccgcgaagtatcgatatactaacgaaactggagagtcaaaaacatggtcaggtcaggggcgaatgccgaagcggatctcaaatctgattgctgaaggtggggaattaaaagattttgaaatcagctaaaaagagccgggtaaaacccggctcttttttgtaaatgccgcaagttgccttagagaatagtcgagaaacatttagttccgtcgatgtagccgaggcgctgtttaaaatcacagtgctgcttaagggagaaaccggttatcttgcagatcgctacagcgagtgaaaagagagccatcaggagctttcattccgagtcaatcaggacaaaaaataacgtatgttcttcgtgaatccatactgcatgagcttaacaacgtctgccattggcacaaagccgatcttcagccctccctaaagattaatgaacacatctaataaaccctagctaattaccccatctaatcgaataaatcagtttgcgttatgcttttccaacacaacagctgaaggataacgtcatgcaaactgtaaaactgaacaacggtattgaaatgcccctgctgggctttggtgtcttccagatgacggatgctgctgaatgcgaaagagcggttattgatgcgatcgatacgggataccgcctgatcgataccgccgcgtcttaccagaatgaaacccaggtcgggaacgctctgaaacagagcggtatcgcgcgtaacgaactttttgtaacgaccaaactgtggctacaggataccaattacgaaggcgctaaagcccagttcgaacgctccctgaatcggctgcaacttgattacgtcgacctgtatctgattcaccagccttacggcgatgtccatggggcatggcgtgctatggaagaactgcagcaggcaggcaaaattcgcgccattggcgtcagcaacttccatccagaccgactggccgaccttatcgcctttaacaaagtggcccctgcggtaaaccagattgaagtaaaccccttcaaccagcagctgcatgctgttccgtggaatcaaagccatggcattcagccggaagcctgggcaccgtttgctgagggtaaaaatggcctgttccagcatcccgtgttaacggcgattggccagaagtacggcaaaagcgtgggtcaggttgtgctgcgttggatcttccagcgaggcatcgtttcgctggcgaaatcggtgcgcaaagaacgcatggaagagaacatcaacattctcgattttgaactcagctctgaagatatgctgcagattgctgccctcgacactgcaaccagcgccttcttctctcaccgcgacccggcgatggtggaatggctgacgggccgcaaacttgatgtttaagtcccgataaaagaggtattcattcaatgcaaaaacgttatctgggtaaatcccgactcgaagtatccgcgcttgggctcggttgcatgggcttaagccacggctatggtccggcgaccgatactcgtcaggctatcgagctcattcgcgcagcggttgaacgtggcgtcaccttcttcgataccgctgaagtgtatggaccttttcttaatgaagaggttgtcggcgaagccttaaaaccatttcgtgaccacgtggtcatcgccactaagtttggttttacttttggcgacgacaacaagcagcagattttaaacagccgtccggagcatatccgtgaagctgtggaaggatcattacgccgtcttaagactgatgtcattgacctgctgtaccaacaccgtgtcgatccagatgtcccgattgaagatgttgcaggaacggtgaaagacctgatagctgaaggcaaagtcaaacatttcggtctgtccgaggctggcgcgctaaccattcgtcgtgcgcatgccgtacaaccggtcactgccctgcaaagcgaatactcaatgtggtggcgcgaaccggagcgggagatcctgccgttactggaggaactgggcattggtttcgttcccttcagcccattaggcaaaggcttcctgacgggatctattaagccaggaacaacttttggcatggatgattaccgcagcactgtgccgcgtttcgccgagcaggcgattgaagccaatgaaaagctggtcgcattgctgggtgaactggcggcagagaaaggtgtgacgtctgcacaaatcgctctggcatggctgctggcacaaaagccgtggattgttcctatccctggtacaaccaaaatgcaccggctggaggaaaatctgggggctgccgacatcattctttcacaggatgactcactgcagataacccaggcgcttgaaacgattaaaatcgtcggcgagcgttactctcctgagcatcaggctcgcgtgggccgttaatacccggacgggtctacggacccgttattccgagtagcgaagtgcatcgatcatcaacgcaaaagcgggcggatgctgcttacggctcgggtaataaagataatatccggggaaagacggacaccagtcctgcagaacctgaataagctctcctgactttatataatcctgcaccctgtcttcaggtatacaagcgatgccaaaaccggataacgccgcatcaatcctttccgcttgcagattaaacgtgacctgcccttccactctgacccgtaacggtttcccatccttctcaaactcccagtggtaaagcccaccggctgttggcaggcgcatattgatacaccgatgattttgtagctcgtgcggcgtttcaggtgcagggtttgcagcgaaataagacggtgctcccaccacagccattctcatgtccggcccaattcttaccgcaatcatgtctttatccacgctttcccccagacggatcccggcatcaaaacgcccctcaacaatatcgacaaagccgttatcaacgaccagttcaacattgatttccgggtattccctgaggaagggttttagcttcggccataccagacttcgcacggcatgctccccggcagataaacggatattaccggaggcagtgccgttcagttgaaccagcgattccagttcctgctcgagatcggcaatacgcggttcaaggcaggcaataattctctcaccggcctctgtaggggctacgcttcgggtcgtgcgggtcagaaggcggatattcagcctttcctccagggccttcatcgcgtggctgagtgcagactgagaaacgcccagtttgcccgctgctttggtaaaacttcgctcccttgccaccacaagaaagatttgcagttcgttgaaattttctttgagcatcggcgatttccttatggaggcattcccttcatcgcacactcatgaagggtgttcatagacacaatcattttagccctattactgacattaatgataattgatattctgaccgtatcgaaaataagtctgaattatcagtaggtttatcatgagaatactcgttgcaggggcgacaggaagtattggccttcatgtcgtcaataccgctatcaaaatgggccatcagcctgtagcgctgatccgaaataagcgcaaagtgaaatcgcttcctcggggaacagatattttttacggcgatgtttcattgcctgaaacactcaccgaattaccgaaagatattgatgccatcatcttcactctcggttccgatggtcagggtcgtattggtgccagggcgatagattatggcggagtgcgcaatattttacgaatattcagggatgtatctgttcgtatcagcctgatgaccacgattggcgtgactgaacgactcagcacctggaatcaacgcactgaggttcatgactggaaaagacgtgccgagcgtctggtcagggccactgatcacccctataccatcgtcaggcccggctggtttgattacaacaatgatgatgaacaccgaatcgttatgcttcagggagatcgtcgccatgcaggaacaccggaagatggtgtgatatcccgggagcaaatcgcccaggttctggtcagtgccctgacccacgacgaggcaaaaaataaaacgttcgagctggtggctgaacgaggtgaagcacagcaggatcttaacccactgtttgcagacctgcaggctgatgatccacaaaaaaatgatggggttctggacatagacaatatgcctctgcgtgaagaacctgactgcattattaacgagctgaatttgtattcaaaaaaattaactaatcgacaaccctgacaattttgtcatatagccgtcagcctcatgacagtttaagtctgtatatttgaatacacagatggaggaagttactcctgatacaagtccagtttcaagcatattgttaaagaggtactagatatgaaaacactacttattactacattggtcatggggtttatttcagtgaatgccgcctctgctgctcaggaaattaaccatgcagatgggaaagaaaagatcggtgtagtatcagtaagcaatgcatatacgcttgatgatttatctaatgcgctctctcgtaaggctgatgagcaaggagcaacgtcattcaaaatcctgtcgacaacgggggataacaggctacatggggttgctgaaatatataagtaaatcattagcatcccgacaggatgtgtcacagccctcttatagtgagcgtcgttctatgttcagaacagaagacatcatcgatgagataacttaatggattgattcaaacttacataaaccgctgaagatagaggatgttgctgcgtgggcaggatactccaggtggcatcttcagcggatttttgtgcaggtgaaataatttatttactccttctttccatgataattatagaaatgtgcagatacaccacttctggactttatagatagctcttcatgcctgtctctataataaaaataaagctcatcgacaatatttttacaagaagagagagcgctttgtatttcattaactacaagatcgtatattttatctcttgatttttcatatattacatttaaatcatatccttctaggtgtgaaccatagccctctatccacgacatattcttaaacatctcatcatcatcagtgtataaattacagaatcccttatgagctcttgtatttctatctgtacgtagaggaccaccagaggaatcaattatttttaagttactcaaaatatcagcatgagtgtctttaataatcttaccgaattgtttaatatttaaagagtaatctgggatattaagttctaaaacctcattaacaaaatgaaaggttatatcgcgaaggcttgaaaatctaaataatgccaaatcaacaattgccttaagccaatcatatcgatttatattttttacttttgaaaccaatggcaaattattaacccctagcatttgagggatgactcttaaatctacgaattgttgttctaatgcgttaaatctaatataggtcaaatgcgcatatgccatatggggatctgctttagagaactcattccaatcagcgtaggaatgatcatacagaaaatatgtattaatcgaatcataaagtacccctttgaaagcagtcccctccagatcccaccaataataatcatctttcatgaaaagcctcgctgaagttaaatgcaaaatccaaaaaaaatcttattttaatgtcagcctaaaaccttatccaactctttactatcagaataaacacttagtattttacgcacccattcctgattatataaatacccatcaaaaccttcgatataaccacagtatttcccttttagagttttatctacatgagatggtctgacatcaaaatgcttccaaaactttgcatgagtactaagattaaaagacttatgttttttttgaaccaactcaactacctttttaggtttcaacttaaattgattttccactcctttgatgaaagcaataccagtatcaaacttctcaagttcatcttcggtgagattattaacattgataaactctatagaaatatcagaacttgatgcctttttacctatcaaggggactaacaaagctctgagtcgatattgttgactttctaatatctcttgctccaagtctcttttataatcctcgatatatttcttaacaatagtgaaattttttgattggactttcttcaaagcgtcgatctgcgcttgctgagacatccttgtaagttgcattgcaagagataagtttaccattaaagcattttcatcaccaaattcgttaatgagaatatcttcaaagttatttattgaagcctggcactcaccaaaagttagtgtatctatttcagggagacctcggtgttcaatgatattacgtaaacctattaaaaaaaacacattcgatttttctggggtatttcttccaagccaatatttttcacagcaggttttcagttcccacgcttttttgtcaccatcaacaattttatgagagccatcatcattcaagtaaaaataatcaacacctctttttgcgaatatagcatgaaataatgatgtatatgctataaccacattaactataaaaccatgagttttaaactctgtaaatggattattgtaaacagaaacagcaagcatagcgaactctcttgctttttttaaattaatgcttcgctcacttttggccggttcaacgctcttctgactatgaagatttctgaagtcttccttacttaagtattttaatccaagtgtggtatattgagcgccatcccttgatatatatttactccatcttttagttggatatgttttacatgtctgaactttccaaccagtagccactgctaactcagcaatagtaaaaaattcttgccgattttcctttcctactaaaaaatcaaaagccttatcaacctgatcatattttttcatacaacatccctatttaactcttaaagatgaatgtctttttagattggtctgcgaaaattttttcgcaaacaaataaaaagacattgtacattctaaatatattattttaatgtacctacatcacacataaaagataacaactcgccataccactgcatcatctccctcctcccatccagatactgcgcatggttatacgtcccacgaattgagttcttatcgacgtgagccagctgtaactcaatccaggccgaattgaaaccctgctcatgcaaaatggtactcatcgtgtggcggaatccatgccctgtaacgcgcccggcatagccgatacgcctgaccaacacagtcaatgccatatcactcatcggtttcttaggatcattacgtcctgggaacagcaacgctcctgctcccgtcatgggtttaagctgattaagtaggtcaattgcctggcttgataacggaaccagatgagggcggcgcattttcatgcgttccgctggtacattccaaacctttttctcaaaatcaaattcctgccactccgcttgcctcaactccccaggccttactccggttaaaataagcaattgcatcgcaatcttaacaagcacactaccagcataggtgttcagagtccgaagaaactcaggcaattcatcctgggttaaaaaagcatagtgttctttttcatgaggagttactgcactggctaaatcaggtgctggattgtactcggccctgccagtcacaacagcatacttccagacctctccacagcgctggcgaaccttacggaccttctcagttgcccctcgagcttctatctttgaaagaactgcaagcaactccatcggcttgatatctttgattggccggtgaccgatataaggaaatacatctttctcaaaggttcgcatcatctcttcacgataggagacagaccagcggtcatagcgacgctgataccactcccgcgtgatagcctcaaaagagttttctgcgtcttgttgacgactaagtttctcaatttttcgttcaagagaaggatcgttacctgcggataatgtccttttagcatcctcacgcttacttcgggcttcagctaaagaaacatcagggtaaacgccgatagcgagcagtttctctttacctagtgaacggtatttgagacgccagtatcttttgccgttgggattaaccagcaggtaaagaccaccaccatcagccagtttgtagggcttctctttgggttttgcagtttcaacctgacgagctgtcagcttcattgggggtacctctcagcagggggtacaattatacccccatccatacccccacattgagcttgaccctgggggagtacaattgagttcaatagactaatagaatgctataactgctgatttatcaaggaaaagttgagtttggtagacttcagggaagttgagtttggagcgggcgaagggaatcgaaccctcgtatagagcttgggaagctctcgttctaccattgaactacgcccgcgaagaggtgcgagggccattatagaccttacgcacccgctgacaagcccataacaggctaactgtcgataaaataaccttttagcacttaggcttactgccctgcggcggcaaatagcgcagcgggtcgatcgccgtcgcccggtagcgaatctggaagtgcaggcgcacggaatccgcgtccgagctgcccatggtggcaatctgctggccaatcttcacgctctggccgttattcaccattagcttgtcgttgtgcgcgtaggcgctgatatagtcctcattatgcttaatcataatcaggttgccgtagccgcgcagctggttgcccacgtagaccactttgcccgcccctgccgcatacaccggctggccgcgcttaccggcgatatcgatacctttattgccgccatcgctggtggagtatggcagcactactttaccgctggttggccagcgccagcagcgttgcccgaccggcggccaggaggattgcggcaccgccgaagatggcgtcaccgcggcggtacgtttcgtcgacgatttcttgccggatgcccccgccttcgccgtggtcccggaaccgctgtttagcttcagcttttgcccgacttcgatggtataaggaggtgaaatattattgagacgggcgagatccctgacgctggtgccagtggaacgtgagatagcgtacagcgtatcgccgcgcttcacggtgtaggtggaaccggaatcggatgagctggaacaccccgcgacgatcaggctgctcagcaacattattgcaataacaaagcgttttctcatcaggcgtcctgcgcttaacactaacattcacctcaaaaccagggcgattatcataccagtccccagggcattccccaatcgctacccgtcatacagaagtattaaacggatagccatgcgtaataatatccatcagcgcgggcagataaggcatagacggcaatttgaccagcgccgggtagaatatttgcggcgaggggaaaacatcaaccacgtagcactggttaagcttatcagcatccacttcagaagaaggtagcagcgtcgccgcctgcagtccggactccagccagtcgaggattacgcccggctgcgtaatgtgcataatcaccttggcgttgaccccggatttacgaaacagctccattagcatctcgtaagttcctgaatcctttgccctatgaagtaataccagcggcagcgccgccagcgacgtgtagctatacggattagacggcggccccggcaggcatcttttattgatcaccgcgaccagcttaatcgggtcaaaagagacataatcaaagccttcgctacggtaggggcgctggattaaggcgaaatcaattgcgccctcggttaataacgtttcgagatggctggagtcagtaacggaaatatttatggaagtgtcgggatgacgtcgatatacctccatcagcaacgctttaaaataattctgatagagatgagttaagccgattctcaattcagttctgtttttgtgcgcaatatccatcgtttcccgcgccgtatcctctacctggcgtaatatttcacacgcttttcgatagagaaaaaaaccggcttccgtaggctcaatgcggtttccccggcgaacaaaaagcgatacctgaagctcctcttccagctcctgaattcgcttgctgagcggcggctgcgccatgttcagcgacttcgccgcctggctcaccgaaccttgttccaccacccgacaaaaatagcgtaagcgctttaaatccatcatcattatccgcagtgtaatttatcaccagtatcacacttagccggagaaataaaaagccgcagcgttgctcctcatattaattaatcattatttaacaccttgttaaaataaacttttttgatctactgaccatccggtaaacggtatttgtttatgcgcgccagggaaaatattgtgccgggagcaaaacttcttttccgaaggaacatcccatggcaaatagtgataacaaaaccccctcatcggtacatgatttacgctccgcgctggaactgctgaaaacgcttcccggcgagtatgttgaaaccgataccgaagtcgacccgcatgctgaactctccggcgtctatcgttacgtaggcgccggcgggacctgccagcgtccgacccgcaaaaatggcccggtcatggtctttaacaaaatcaaaggctttaaagatatcagcgtggcgattggcctgaatggctcccgccagcgcgtcagccatttcctccagtgtgaaccggctaaactggggcatctgctgaaggattcggtggagaatgcgatagcgccggtgatggcccagggcgcagcggtctgccagcaagtggtccacctggcaagcgatgccgatttcgatctgcgcaagctgctgccggcgccgacgaataccgaagaggacgcgggcccctatatcactatgggtctgtgctacgcctccgatccagaaacgcatgagtccgatatcaccattcatcgcctgtgcgtccagagccgcgacgaactctccatgtggctaacgcccggccgccatatcgatgcttttcgcatgaaggcggaagcggcaggccagccgctgccgatttcaatcagcatcggcgtcgatccggccattgaaattgccgcctgttttgagccgccgaccaccccgctaggcttcaatgagttaagcatcgccggcgcgctgcgcggcaaagcggtggagatgacgcagtgtaaaactattaacgagaaagcgatcgcccacgctgagatcgtgattgaaggcgaactgcggcccaacgcgcgcgtacgagaagatcagaacacccataccggccgcgcgatgcctgagtttccgggctacaccggcgaagctaaagaggcgatcccggtcatcaaagtgaaagccgtcactcaccgtatcaatcctatctggcgcaccaccgtagggccaggcgaagaacacgtcaatatggccggtatcccgaccgaagccagcattctggatatggtcgagcgcgcgatgcccggcaagttgctgaacgtcttcgcccattccgcgggaggcggcaaactgctggcggtgctgcagtttaaaaaatcctccccggcggacgaagggcgccagcgtcaggctgctctgctggcgttctcagccttcccggaactgaagcacgtcattctggttgatgaagacgtcgatattttcgacagcgacgacgtgctttgggccatgcaaacccgctaccagggcgatgtcgatacgatcgttattcccggcgttcgctgccatccgctcgatccgtcgcaggtaccggaatacagcccgagcatcctgcagcagggaatgtcctgcaaaacgatattcgactgcacggtgccgttccatctgaagcacaccttccagcgctccagatttaaagaagtggacgtgaagcgcttcctgccggatttcgaataaaaggagaacctcatgacggcacgcatcatcattggtatcagcggcgcatccgggtttcagtacggcgttaaggcgctggagctactgcgcccgcatcccgttgaagtccacctggtcgtctctaaaggcgcggaaaaaacctgcgagctggagacggatcaccgcctggacgaggtgatggcgctggccgacgtggtgcatcccatcgcgaatcttggggcggctatctccagcggttcgtttaaaacgctgggaatgttgatcgcgccgtgttcaatgcgttctttaggcgccatcgcccactgcctgaccgacaacctgctcacccgcgctgcggacgtggtgctgaaagagcgtcgccgcctggtgctgctggcccgggaaacaccgctgaaccttggccatatccgcaatatggccgccgtaaccgaaatgggcggaattatctttccgccggtcccggcactttaccagcgtccgcaaacggcggacgacatcgttacccatagcgtcaatcgcgcgctcgatctgtttgacctgcaggtcaacaacatcccccgctggggtgaaggcgagctacgttttaattaaccggaaattattcaatgttaatcggcccatatgtaaacggagccgccgtgattatcggcggactcatcggcgctgcggcgggcggcaagctccccgagcgcgtcaaaacggcgctgccgatgaccttcggcctgtgctccgttggtcttggtattacgctggtgctcaaagtgaaatatatgcccgccgtcgtgctggcaatggtgattggcgccatcctcggcgaattgctgcatctggaaaagggcatcggtaaagccgcaggttccacccgcggtttgatcaacaaggtgctgccgccggtcaatggcctcggccatgaagagtttaccgagaaatttgtcgccatcctggttctgttttgcgccagcggcaccggtattttcggcgcgatgaccgaaggcatgagcggcgatccgtcaattctgtatatcaaaacgattctcgatctatttaccgccgggattttcgcgacgctgctgggctacgcggtgatgaccattgctatcccgcaggtcattattcaggtggcgctggcgatgctggcggtggttattctgccgtcgatctcgcctgatatgatggcggatttctcctgcgccggcgggctgctgatggtggcgaccgggttgcgtatctgtaacattaagctctttccggtagccaacatgttgccagggcttgttttggtaatgcctttgtcccatttatgggctaccctagtggcctgagtacatgacccggcgggtttgtgccgggtcattttctatttcaggagttgtcatggccggggaacatgtcattttgctggacgagcaagataagcctacaggtatgctggagaagtatgtcgcccacaccctcaacacccctctgcatctcgcgttttccagctggctgttcaatgaacaaggccagctgctggtcacgcgccgctcgctgggcaaaaaagcctggccaggcgtatggacgaactcagtctgcgggcatccgcaaaccggcgaaacctttgaacaggccgttgagcgccgctgccgctttgagctcggcgtcgagataacccgcatcgtcccggtctttccggggttccgttaccgggccgtcgcgccgaatggcattgtcgaaaacgaggtctgcccggtctatgcggcacgagtcgccagcgcgttacggataaatgctgacgaagtgatggattttcagtggagcaatcttgcggatgtgttaagcgggattcgcgcgacgccctgggcttttagtccgtggatggtgctgcaggcggcggacgataatgcgcgtaacgcattaatcagctttagcaatcaggcataaaaaaacccagctctgctgggtttttttattcgcgtaatgcttattttaccggacgcatcgccgggaacaggatcacgtcgcggatggtgtggctgttggtaaacagcatcaccatacggtcgataccgatacccaggcccgcggtcggcggcaggccgtgctccagcgcggtaacgtagtcttcgtcatagaacatcgcttcgtcgtcaccggcggctttcgcgttaacctgatcgaggaaacgctgcgcctggtcttccgcatcgttcagctcgctaaagccgttaccgatttcacgcccgccgatgaagaattcaaagcggtcggtgatttccgggttctcgtcgttacgacgcgccagcggagagacttctgccggatattcggtaatgaaggtcggctgaatcaggtgcgcttccgccacttcttcgaagatctcggtcacgatgcggcccagaccccagctcttctcaacgtggataccgatgctttccgcaatggcttttgcagaatcgaagttatccagatcggccatctcggtttccggacgatacttcttgatcgcttcgcgcatggtcagcttttcaaacggcttgccgaaatcaaaagtctgatcgccgtaaggcacttcagtatggcccagaacgtcctgcgccagagtgcggaacagggattcggtcagttcgatcagatctttgtaatccgcatacgccatatagagttccatcatggtgaactctgggttgtggcgaacggagataccttcgttacggaagttacggttgatttcgaacacgcgctcaaagccgccaaccaccagacgcttcaggtacagttccggcgcgatacgcaggtacatgtccagatccagcgcgttgtgatgggtgatgaacggacgcgcggacgcgccaccggggatcacctgcatcatcggggtttccacttccataaagccgcggccgaccatgaactggcggatgccggccaggatctgcgaacgcactttaaaggtgttgcgcgattcatcgttggagatcagatccaggtagcgctgacgatagcgcgcttcctgatcctgcaggccgtggaatttgtccggcagcgggcgcagggctttggtcagcaggcgcagctcggtacaatggatggagagttcaccggtcttggttttgaacagcttaccgcgcgccgcgatgatgtccccgaggtcccattttttgaactgctcgttgtagacgccttccgccagatcgtcgcgggcgacgtacagctgaatgcggccgccaacgtcctgcagcgtaacgaaggaggctttacccatgatacggcgggtcatcatgcggccagcaacggcgacttcaacgttcagcgcttccagctcttcgttttctttgccatcgaagtcagcgtgcagaaggtctgaggtatggtcacgacggaaatcattcgggaacgggataccctgctcacgcagcgcggccagcttctcacgacgggctttcagttcattattaaggtcaattgccgcgtcagcgccctgtgcttgttgttcagacatgttggttcctcataaccctgctttcaaacttgcttcgataaattgatccaggctgccgtccagcaccgcctgagtgttgcgggtttccaccccggtacgcagatctttaatgcgggagtcatccagcacgtaagaacggatctggctgccccagccgatgtcggatttggtatcttccatcgcctgcttctcggcatttttcttctgcatttccagctcataaagcttcgctttcatctgcttcatggcctggtctttgttcttgtgctgtgaacggtcgttctggcactgggtcactaagccggtcggaatgtgggtaatacgcaccgcggattccgtacggttaacgtgctgaccgcccgcgccggatgcgcgataaacgtcaatgcgcagatccgccgggttgatgtcgatatcaatatcgtcatccacttccggataaacgaacgcggagctgaaagaggtgtggcggcggccgccggaatcgaacgggctcttacgcaccaggcgatgaacgccggtttcggtacgcagccagccgtaggcgtagtcgccgataatcttgatggtcacagacttaatgcccgccacttcgccttcagactcttcgatgatctcggtcttgaagccgcgcgcttcggcccagcgcagatacatgcgcatcagcatgctggcccagtcctgcgcttccgttccgccggaaccggcctggatatcgaggtagcaatcggcgctgtcgtattcaccggagaacatgcggcggaattccagctgcgccagcttctcttccagcacatcgagctcggcgacggcttcgttgaaggtctcttcgtcttcggcttcaatggccagctccagcaggccggaaacgtcctccagcccctgagacatctgatccagcgtatcaacgatggcttccagcgaggaacgctctttacccagcgcctgcgcgcgctctggttcgttccagacgtcaggctgctccagctcggcgtttacttcttcgagacgctctttcttagcatcgtagtcaaagataccccctaagaacgtccgagcgctccgtgaggtcctgaatacggttttttaccggatttatttcaaacatggtcggtttcttttaatggattcgtcaaaatgcggtgataagagcggaattctaccggattcgcgccctcattaatatactgttctcaatttggccagaggtggtcaatgatcagctgcaggctgcggttgccgcggaactcattgatatcaagcttataggcaagctgaacttcgcgaacgccgttatccggccaaagggaagtatcaacattgaacgcgataccgtccagcagcgggccgccgccgaccggctcaaccatcaccttcagatgacgctcgccgaccaggcgctgctgtagcagacggaaacggccgtcaaacagcggctccgggaacatctgcccccacggtccggcgtcgcgcagcatctgcgcgacctccatgctcatctctgccgccgccagcggaccgtcggagaccacttccccctgcagcagcgcaggatcgagccactcggtcaccagctcgccgaagcgctgctggaactcttcaaagcgcgcctcttccagcgatagccccgccgccatggcatggccgccaaacttcagaatcagcccgggatagagcgtatccagacgctccagcgcatcgcgcatatgcagcccctgaatcgaccgaccggagcctttgagcgtaccgtcgccggtgggcgcaaaggcgataaccggacgatggaaacgctctttgatacgcgaggccagaatgccaacgacgccctggtgccactgcggatggtacatcgccaggccgccgggcagcgtctcaccgctgcgctccagcttctcacacagggtcagggcttccgcctgcatcccctgctctatctctttgcgcgtctggttcaacgcgtccagctcattggccagcacccgcgcttcgccggtgttgtcgcacagcagcagcgccacgccgacggacatatcgtccagccgcccagccgcgttaagccgcggaccgagcgcgaagccgagatcgcttgccgccagcttttgcgggtcgcggttggcgatctccagcagcgccttaatgcccggacggcatttccccgcccggatgcggctcagcccctgccaggtcagaatacggttgttggcatccagcggtacgacgtccgccacggtgccgagcgccaccagatcgaggaggtcagccagattcggcggcgcaatgccgcgctcctcaaaccagcctttatcgcgcagaaaagtgcgcagcgccagcatcagataaaaagccacgcccaccccggccagcgatttcgacggaaactcacagtcgcgcaggttcgggttaataatcgcttccgccgcgggcagcgaatcccccggcaggtggtgatcggtcaccagcaccggaatacccagcgcatgggcgcgatcgacgccagcgtgcgaagaaataccgttatccacggtcataatcatctgcgcgccgcgggcgtgagcctgatcgaccacttccgggctcaggccgtagccatcttcaaaacggtttggcaccaggtacgagacgttgccgtagcccagcgcccgcagggccagaacgctcagcgcggtgctggtggcgccgtcggcgtcaaaatcgccgaccaccacaatatgcagcccctgctgaaatgcgccgtagagcatctctaccgctttttcgacgccggtcagctgcgaccacggcagcatgcctttcacgccgcgttccagctcctgcgcgctacgcacgccgcggctggcgtacagccgctgcagcagcggtgggagatcggcaggtaaatcgacgccgtcagccgcctcgcggcggcgtagttgtatctgttgtttcacgcgaatcagttaccgcttgtctgtttttgatgctcatcaaggagcgctttcaggtctttaggatcgcgatagccgggcatcagcgtgccgtcgctcagcaccatcgccggcgtgccgttaacgccaagctgcacgcccagcatgtagtgtttagcgatatcaacatcgcagctggccggctgcacgcccttaccgctcatcgcgtcatccagcgctttgttacgatctttagcgcaccagatagccttcatattctgctcggcttcgctttgcagcccctggcgcgggaaggccagatagcgcacggtaatacccagcgcgttatagtcgctcatctgctcatgcaatttatggcaataaccacaggtaatatcggtgaagacggtgatgacgtgtttttcctgcggcgctttatagacgatcatctctttttccagcgcgttcagcttaccggccagcagcgtattggtgacgtttaccggctgcgcgccgctgacgtcgtacatcggcccctggataatgtgcttaccgtcatcggtaacgtatatcacgccgctgtccgtcaatacggtgctgatgcctttgatcggcgaaggttgcacgtccgaactctgcacgcccagcttcgccagcagttgcttgatcgccgcgctatcggcatgcgccgcaccggataaggtggtcgccagcagagtgaacatcagtaaaccttttttcatactcagtcctttttttcagcactcacgcacgcgggtgatgctgttgatggagttgtcgcagacgctcggtcgccacgtgggtgtagatctgcgtcgtggagagatcgctgtgtcctaacagcatctgcaccacgcgtaagtcggcgccatggttaagtaaatgcgtcgcgaacgcatggcgtaacacgtgcggggagagcttttcgctgtcaatccctgccagtacggcatagtgcttaattcgatgccagaacgtctggcgcgtcatctgctgcgcgcgctggctgggaaaaagcacatcggacgccacgccgttcagcagccaggggcgcccgtattcaaggtaattctcaacccacagcaccgcctcttcacccagcggtaccagacgttctttatttcctttaccaatcacgcgcagcacgccctgtcgcaggctaatgtcgctcatggtcaggcccaccagctcggaaacgcgcagaccggtggcgtacagcacttccagcatcgctttatcgcgcagctccagcggttgttcaaccagcggcgcctggagcaggcgttccacctgcgcctcgctcagatccttcggcagcctctgcggcagctttggcgaggccaacagcgcgctgggatcgtccgggcgaattttctcccggtaaagatgctggaagaaacggcgcacggcgcttagcaggcgcgcggtgctggtggctttatagccgccggtttgccgctccgccagcagcgactggagatcttcgccgctgacgctggcaagcgacaggccacgatgatgcagccattcgaccaccatcgtcaggtcccggcggtaggcgcttagcgtgttctccgccagattccgctccagccataaggcatcaagaaactgctcgatttgtgcgagatcctgttccactccggcctctttgcttattaaaacggcgccattataccctaaataattcgagttgcaggcgggcgcggcctttctggtacactaagcgcaaagtcacagcaagaattgagacgtttccgcgatgaacataggtcttttttacggttccagcacctgctacaccgaaatggcggcggaaaaaatccgcgatattatcggccctgaactggtcacgctgcacaacctgaaagatgattcccctgccctgatgacgcaatacgatgtgctgatcctcggcattccaacctgggatttcggcgagatccaggaggactgggaggcggtctggcagcagctcgatacgctggatctgcagggtaaaatcgtcgcgctgtacggcatgggcgaccagctaggctacggcgaatggttccttgatgcgctcggcatgctgcacgataagctggcgaccaaaggggttaagtttatcggctactggcctactgaaggctatgaattcaccagcccgaaaccggtcattgccgatgggcagctgttcgttggcctggcgcttgatgaaacgaaccagtacgacctgagcgatgagcgcattcagaactggtgcgagcaaatcctcggtgaaatggctgagcagttctcctgagtccttgcctactcttgcgtcggttttagcaacaccagccgacgcaggtctcgccattctcccgcgtccatgctatccgccgcgacccacaaatgctgggttcgttggttttccgtattccgcaggcgcagcagcattccgctgttaatcacccacggggtgccgatgatatcccactccgccttttgccagcgcagacgggagtcgatcagcagcttgatttctccctgacgggcatggatccgccgctggctgcgcacgcagtcgaacaccaccagcgacagcagtatcagccacagcggggtatagctcagcggccagggcatcagcagcacaagcgccgccaccacgccgtgcatcagcagcgaaaaccactgcgctcgccacgagatgcgtaaatcagattgccacaggaccacgttcccgattccgtgtctgaattaattttaccatccgctgcagttctgcatcagccggctcgccatgattcatcaaccagttgaacagatccggatcgtcgttttccagcaggcggatgaataacgctttatcgccatcgctgagcgtgtcgtactcatgctcgaaaaacggcatgatggagatatcgagttcacgcatacctcgacggcatgcccagtggatgcgggctttattgttaatgtccatgttttacttcctgcttataaatatctcttagtttaacccgttttcggcgctgacttcactggaatatcaagtttcgcgagcgctattccatgaaaaccctaaaataatcaggccatttattatttcgctggtttcagcgccccgtctttgagggcacgaatggcctgtcaaaagcgcttgcattgcaccatagctcttttaccattagtcacacactctgcgttaagctattcaggatatgactatggcttttacaccttttcctccgcgtcagccttcctcttccgctcgtctgccgttaacgctgatgacgctggacgactgggcgctggcgacgattaccggtccggatggcgaaaaatatctgcaggggcagattaccgccgacgtcagccacctgaccgacgagcagcatctgcttgccgcgcattgtgacgccaagggcaagatgtggagcaatctgcgcgttttccgccgcaacgagggttttgcgtggattgagcgccgcagcctgcgcgatgcgcagctgaccgaactgaaaaaatacgcggtgttctctaaagtgaccatcgccgccgatgatgaatccgtactgctgggcgttgccgggtttcaggcgcgcgctgcgctgtcgccgctgtttagtgagctgccgaacgccgagaaacaggttgtcagcgaaggtgccaccagcgtgctgtggtttgcgcatccggccgagcgtttcctgctggtgaccgatgtggcaaccgccacccgcatcaccgatgcgctacgcggtgaagcgcagctcaacaacagccagcagtggctggcgctgaatattgaagccgggctgccggttatcgacagcgccaacagcgcgcagtttattccgcaggccaccaacctacaggcgctgggcggcatcagctttaagaaaggctgctataccggccaggagatggttgcccgcgctaaattccgcggcgccaacaagcgcgccctgtggtatctggcgggaacagccagccgcgtgcctgaggccggggaagacctggagctgaagatgggtgaaaactggcgccgaaccggcaccgttttagcggccgtgcagctggacgacggtcgcctgctggtacaggtggtgatgaataacgatatggagccggacagcgtgtttcgcgtacgcgatgatgccggtagcctgagcatcgagccgctgccgtattcgctggaagagagttaaagcgatattccctgccgccttctccccggaggcggcaatcccgcgcctgtctgggctaccccacccgcaaaccacgaaacacccgcggccgcgcgctttgcgcaaatgcgccatctctggcccaggccactttcttgcgtagaagaatagtgtatgttctgaacaatcatttatttcttaagcggtaaaagagatgagacggattgaggtcatactgggagagctggagcggttaactcgcgggctgaatcttgcggatctggaacaggaaacggcatttacggcggaagccatcggctttaacctcgggcttgcgcgcaactcggtcagcaaagacctcaatcagttatggaacgacggcctggcgattaagagcagaggacgccccgtgttcttttggcaccgccaggcaatggaaacgctgctggggcgcagactgaatgataccgaatgtgaagtgcgcacggttgccgaccttctgccgcatcaggaaggttgctcaacggatgaccccttcagcggcctgattggctacgatcgcagcctccgtgatgcggtggaaaaaggccgcgcagcggtgctttatcctcacgggctccacgtattgctgaccggcccctccggagtaggtaaaactttctttgccgagctgatgcaccgttttgcctgcgagcatgcggcgggttctcccccgccgctggtctactttaactgcgccgagtatgcgcataacccggagctactctcttcgcatttgttcggccatcggcagggcgcatttaccggcgccagtgagaataaagccggtctggtggagcaggcggacggcggatatctgctgcttgatgaggtgcaccgcctgccgtatgaaggacaggaaaaactcttctccattctcgacaaaggccaatatcgcccgctcggttcaagcgccacggcgcggtccatcacggtgcgcttgatttgcgccaccaccgaaccggtcagctcagccctgctgcgaacgttccagaggcgcatccaggtctgtatcgatctccccgggatccgtcagcgctcggtggaagaacaggtggaacttattgtcggttttctccagcgcgagagccgcaaaattgagcgtacggtcagtatcgacaaaacgctgttgctctggctgctgaataaaccgctggaaggcaatatcggccagctcaaaagcgatatccagtttctttgcgcccaggcgtgggccgcgggaatgaccgagcataacgacacgctccagctggataaacggctggtagaagtgccgttcaacgccaccccggaacagcgtctgctggtcgataccttgtttgacggccaggatcggctaagcgtcgatgcgcgcacgttacccgcattgaaaacctctctggcgacaggagcggagatcgaagaaagcgatctgttttacagcttcctgacccgcgaatacgtcaacctgcgcaacagcaacgtcccaccggctgagacgctggcgatcctcaaaaacaaactcagttctatctttgaatatggtctctacagccgcgacagcgtggcccatccgccgcgctatggcgatcggattgaagagcgggtgaccctgctaattggctgtgtggaacaggtgctgggctttacgctgccagaaaacctgatgaatccgctgcgtaaacactttctggcgctgattggctacgtgcagcgcgggctgatcccacagctctactcctccagcctgatcctcgaccgctgcaaagacgagtatgaaaacgcgactctgctgtgccggaaaatcaacgaactgctgcatattcagtgcccggcgacggaggtcgtctggctatgtctgttcctgaaagagtgccgccattatcgccagcggatcgacgccagtcccgactgcggcgtcattttaatcgcccacggcgcgacgacggcgaccagtcaggcgcagtacgtcaaccgggtgctggagcgcgagctgttcagcgccatcgatatgccctttgagcagtcggtgcatgacacgctggaaacgctaacccagcggatccagagccaacgctaccggcggctgattctgatggtggatatcggctcgctggtgcattttggcagcaccatcagcaagctattccagattgacgtcctgttaatgcccaatattacgctgaccagtctgctggagctgggtctggatttaagctatgaaaccagcgagctaccgcagctggcggaattactgcagagtaaaaatatcccctgtcagctctgtactccgcagcaggagaacggcggtaaggtgctggtgatctcctgcattaccggcatgggaaccgcagagaaaatcaaaaaagtgctggaggaaagttttggcgagctgatgtcgcaggatacgcgaatggtgatcctcgattacaacgaggttcgcagcctggagcgcgttcagcagtcgctgctggccggtgagcgactggcggggattgtcggcaccttccagccggggctgccggatattccgtttatctcacttgaagagctgttctccgagcaggggccggaactggtgctcagcctgctcacgccggacctctcaagcagtgagcgccgtctggagatggagcgcagcgcgatgcgcttcatcagcgcgctgaccatggaaagcatcatcaaccatatttcggtactcaatccccagcgcattctcaaagagatggagggggtgtttaaccatttaaccacctcgctttcgctgaaacccagccgccaggtgacactgcgcttcctgatccactgctgttgcatggtcgagcgtatcgtaattaaccggaaaccgttacagatgtcgctggagagccagcccgcgctggacgtccgcgcgtttagtgtcattaaatccgccttccagccgatcgaagaggcttatgccattcgtttatccgacgcggaatatttttatatctacgaactgctgtatcgctgatcccttaactggcgtggctttacgccgcgcctgcccctcttcgccccccatgtgacacaaattctggcacagcctttgctcttattacgtatatcaacgtaatagcgccaggaggccattttgattaccactgaacctttgtcccagatcctgctgctgacccatggcggctggggacagcagctctgcaacagcctgtgcatggtgacgggcgaaattaaaggcgtaacggaaatcgccctgatgcccgtcgataccttgggcgagttttatcagcgcgtagaagccgtcgtgaaaaccctgcccgaaggctcgcttattctgaccgattttattggcgggaccacctctaacgtggccgcgcggctaagcgccgattatccggtggcggtgatttccggactgaatgcctcgctgctgctggaggccctggacaagcgggaacaggggccactatccgcctgcgtagctgaattagtggaagccgcgcgcagcagctgtctggacgttgtcgcccacgttcggcaattacaacaatcacaataaggaaaaaatatcatggctaacatcgtgttatgtcgcatcgacagccgcctcattcatggacaagtggtgacgaagtgggtcggacaatcccaggccaaccggattgcggtagtgagtgatgagctggacgccgatccgtttatgaaaaatatctatctgatggcggcaccgccaaacatcaaagtggattgctacagcaatcagagctttgccgcatcgtggaaagaaaaccagcttggcgacggcagcgtgatggtgctgttcccctctctcgcggcgattcaggaagccgtacagctcgggtttgatgtttccgccattcaggttggcggcttaggcggcgggccgaaccgcaaggtcgttttccagaacatcacgttggatgaaaaagacgttggcattcttctcgacctgaaaagtcgagggattaaggcggtcttccagactatcccggaagataagccgcagtcgctggacgatatcctgaaaaaattctaatcctctgattacagggtaaataactatggatactttagtcttcgcaagcctgatggggttgtattactggtttgcccgcttacgccttggctacaccttctccgccatgctgttacaacctgttgtaatcgccgtttttgtcggcctgctgttgggcaatatggaaacggcaatgattattggcgcaggtatgcagctggtttacctcggcgtgacctcaacgcccgggggtaacgtgccgtcagatccggcgctggcggcctgtatctcgattcctatcgccgtaaaagccgggatggacccgaacctggccatcgcgctggccatcccgtttggcgtgatcggcgttttccttgaccagctcagacgcacgctgaacgccgcgtgggtgcatatggcggataaacacgcggaaacggccaacatgggcggtattatgcgctgcgcgttcctctacccggcgttgctcggcctggtgctgcgtttcccggtggtgtttgctgccaactattttggccaggacgtggtagagagcttccttaagctgatgccgcactggttgacccactcctttgaaattatgggcggaattctgccggcgctgggctttgccatcaccatcatggtgatcggtaagaagagcctgctgccgtggtttatcggcggattctttgcggtgctgtacctgaaggtggacatcatggcgatggcaatctttggtacctgcgtggccttcctgattaaaggcctggcgaaaaatgaaggagcagcatgatgagtagcgacgtaatgcagcatgaactggtggagcgcgcgcgggagaacggcacgctgaccaaagcggacatcaccaaagcctggtttatttactggctgggcgcggaagtttccagctcctatgagcgtttacaaagcctgattttctgcgcctcaatgacgccgattatcaaaaaactctacccgcaaaaagaagagcaggtggaggcgctaaaacgccatctgaacttcttcaactctgagcagacctttggcgcggtgattcaggggatctcgattgcgatggaggagcagaaaacccgcggtgaaccgattagcgacgcgtctatcaccgggattaaaaccgggctgatggggccgctggccggaatgggggactccatcatctgggcggccgtcatgccgttgctgattgcgattttcatcccgttcgccgccagcggcagcgcgatgggcggcattgtgcccttaattctctatccggccattacgctggcgatcagctacggcatggtgcacaaaggctacacgctgggacgcgactcaatcatcggcctgctccagggagggcgaattaaggagcttatctacggcgcgaacgtgctgggcctgataatgatgggcgcgctctccgcaagctacgtcaaaataacgacccccttaaagctcagcgcgctgaagggctcggaggtggtggtccagcaaatcctcgactctatcgcgcccggcctgttgccgctggcggcggtgtttgccatctacttctatctggtgaagaaagggccgcgctacaccaccattctgctgtcaattgtcgcgctcagcgtggtctgttcgctgctgggagtgctgtaaaccatgacgcagaatatctatcaacagctggggttaaaacaggtgattaacgcctgcggcaaaatgacgattctgggcgtttccagcgtggcgccggaggtgatgcaggcaacggcgcgggcggcatcggcctttgtggaaatcgacagcctggtagaccgaaccggcgagcgggtctcccgctttaccggcgcggaggacagctatatcacctcctgcgcctcggcgggaatcgccatcgccgtggccgccgcgattacccatggcgaccaggcgcgagtgatgcagatgccggacagtcgcggtatggccaacgaagtcgtcatgctccgcgggcataacgtcgattacggcgcgcccatcaccagcgcgattcgcttaggcggtgggcgcgttgtggaggtcggttcaagcaatctggcggcgcgctggcagctggagagcgcgatctctgccagcaccgccgccctgctgtatgtgaaatcacaccactgcgtgcaaaaagggatgttgagtatcgaggatttcgtgcaggtcgcacagactcacaacctgccgctgattgtcgatgccgccgccgaggaggatttacgcgtctgggcggcgagcggagcggacatggttatctatagcggggcaaaagcgtttaacgcgcccacctccggattcatcaccgggaaaaaacagtggatagcggcgtgtaaggcgcagcatcacggtattgcccgggcgatgaaaatcggcaaggagaatatggtcggtctggtttatgcgctggaacactatcatcaggggcagaagggggtcactgccgaggaactcctgcccgtcgcgaaagcgatctcagcgataaacggcttacaagccgatattgagcaggatgaagccggacgcgctatctggcgtatccgcattcaggtgaatgcccaggaactcggcctggatgcccgcgaagtcgaagcacagctgcgcaatggcgatatcgccatttacgcccggcgctataacctccatcagggggtttttagcctggacccacgaacggtagccgagggtgaaatgagcctgatcgtggcgcgcctaaaggagattgcagaccatgcagcaaattaatttttaccgtcaacgcgtcgcgattaacgtgctggcgaaagatatcgccaacgcccgggacatttatgatgccgccgaaggccatgcggcgattggcgtcctctcggcacagtttgcctccgtggaagaaggtgttcaggaggtaaaacgctggatggcggagataccctccatctccgtaggcctgggcgccggcgatcctgcgcagtattacaaagcggcgatgatcgcgtcagcgcttcacccggcgcacgttaatcagacctttaccggctgcgggtttgccgcaggggcgctggcggctacgggggggcagcaaacctgcattaacgcgctggtcagcccgacgggaacccctggcgaggttcttatctccaccggcgtcagcagctgtcagggcacgccggcccgcgtctcctgcgatgcggcggtacgcatgatgcaggacatgggggcccatgcggcgaagtttttccccatgggcggcgaaaagtcgttaccggagctgtatatgctggcgaccacggcagcccgtaacgggatgacgttaatcgaaccaaccggcggaatcgatctcgataactttggcattattttgcaaagctgtctggaagcaggcgtacctcgcgtgatgccccatgtttacagctcgataatcgacccgcaaaccggcaatacccggccagaagatatccgcagattaatggatatcgtgaaagccgtggtctgaataaaaaacaccaggccgtagcccgggcaggcaggccatcaccaacgaagaatgtcccggaggcggcgctggcgcgccatgtccgggctaccagccctcagacgacgatgaacctgtagcccggctaagcgtagcgcgagccgggagatttcgcgaaatttaaacctgcccgacgtacaaataaatggccaggaagtggcacacgctgccgcccaggacaaaaccgtgccagatagcgtggttgtacggaatacgtttgcagacgtagaaaataacccccagcgaatagaccacgccacccacggcaagcagcgtcacgccgcccaccgccagcttaatcgccagctgataaacgacgatcagcgacagccagcccatggtcaggtaggtcactaaagagaggatcttaaaacgatgcgcaatggtcagcttaaacaggatccccagcagcgccaggctccagatgacgatcatcagcccacgcgatagcggcgaatttagccccaccagcagaaacggcgtgtaggtcccggcaatcagcaaatagatggcgcagtggtcgaattttttcagccacagcttagcccgctgatgcggaatcgcgtgatagagggtcgaggcgaggaacagcaaaatcatgctgccgccgtacaggctgtagctggtaatggccgtggcgccggcgttgctgtccaccgcctgcaccagcagcagcaccagaccgacgataccgaacaccagcccaatcccgtgactgacgctgttggcaatttcctctgccagagaatatccctgtgtgattaacgatttgcgacccatatttgactccgaaaacaagtacgctttcaatgcacacttaggttaactgagaatgattccagtgaacacctgttcgctaaaataaaaagatgaatatttatgaacagtataaaatcaataggttacataaaaatttcaactaacagacgttcactgtttatttaaagcttttcgaattcaataacataaaactgcttttcttcaggatagatctccgcaatcacctcacgcagctgcgccagggtcatattctcctgctgcgcgtgcagttcactcagcgtatccagcgtcaccgttgaggtggccaccacgcgaatggtgcaaaaatagccgtcatcttcatagcggccaacgcgcaacacatcgcccgttttaaagagtgattcagccgcatcgcggagggtaatggttttgcgtccggcgaggatgtcgtcctgaaaacgctgaaaaaaggttatgtcatttggctgcatgatatcattccgtcctggtcattatgaattgtgagttcgccactgtgagtatcttctcccacgccgctatcgccagtctcaataaccttgagatgatggtctatcactacgtcattaaaaatcgcgacaaagtgatgtacatgaccatccgcgagctggcggaagcggccggagtctccacgactaccgttttgcgcttctgccgcaagctgcagtgcgaaggctactcggagtttcgcgtacgctttaaattatatctggagcagaatgagcctcaacaggcaaatatcggcgccagcgaaataatgagcttttttaaaagcgttaataacgatgaatttgaccagctgctcgagcaggcggtcgatattattctgtcttcagaacgtattatttttgttggcgccggcacctccggcgcgctggcaaaatatggcgcgcgtttcttttctaacgtcgggaaattcagtaaccatatcgacgacccttatttcccggtgaccaatgatatggcgcgtaatgcgctggccatcgtgctgtcggtctccggcgaaaccgaagagatcctgcgcttcgccagccagttcagcctgcatcgctgtaaagtgatgtccatcaccagccacgagcactcgcggctggcaaagcttgccgactttaatctctcctggcacgttccgcaaacgcgcatcggcggcgtctatgacattaccacccagatcccggtcatttatattctggaaacgctggggcgtaaattagcgcgcaaactcgcctgaaaataacagggtgttttttcgatgtaacaaattccattccgggcaaattgttatatcgtgacatttatattccctttgttagactcgcagccaacaagtcattaagacgagatgagcaaagatgaagaaaattcctttaccaaaagactttttatggggtggcgccgtcgccgcgcaccaggttgaaggcggctggaataaagacggcaaaggcccgagcatctgcgacgtgcttaccggcggcgcgcacggcgtgccgcgcgagataacccagcaggtagagccgggcaagtactatccgaaccacgaagccatcgatttccacggccgctacaaagaagacatcaagctgttcgccgagataggcttcaagtgcttccgcacctctatcgcctggacgcgcatcttcccgctgggcgacgaaagccagccgaatgaagaagggctgaaattctacgatgacatgttcgatgaactgctgaagtacaacatcgaaccggttattaccctctcccactttgagatgccgctgcatctggttcagcagtacggcggctggaccaaccgcaaagtggtcgatttctttgtgcgcttcgccgaagtggtcttcgagcgctataagcacaaagtgaaatactggatgacctttaacgagatcaacaaccagcgtaactggcgcgcgccgctgtttggctactgctgctccggcgtggtctataccgagcatgaaaacccggaagagaccatgtaccaggtgctgcaccatcagtttgtcgccagcgcgctggcggtgaaggcagcgcgtcaaatcaatccggagatgcaggtgggctgcatgctggcaatggtcgccctctatccgttctcctgcaagccggaagacgtgatgtttgcccaggaatcaatgcgtgaacgctacgtctttaccgacgtccagctgcgcggctactacccgagctacgtcctgaacgaatgggaacgccgcggcttcaatatcaacatggaggacggcgatgcgcaaatcctgcgcgaaggcacctgcgcgtatctcggcttcagctactacatgaccaacgcggtgaaagcggaaggcggcaccggcgacgcgatctccggctttgaaggcagcgtgcccaacccgcacgtcaaagcctccgactggggctggcagattgacccggtcggcctgcgctatgcgctgtgtgaactgtatgagcgctaccagaagccgctgtttatcgtcgaaaacggcttcggcgcgtacgataaagtcgaggaagacggcagcatcaacgacgactatcgcatcgactatctgcgcgctcacgtcgaagagatgatcaaagcggtgacttacgacggcgttgagctaatgggctataccccgtggggctgcatcgactgcgtctccttcacgaccggtcagtacagcaagcgctacggctttatctacgtcaacaaacatgacgatggtaccggcgatatgtcccgctcgcgcaagaagagctttaactggtacaaagaggttatcgccagcaacggcgagaaactgtaatcatcttgcccctttccagccggaagggggcaaaacttcccacaaaacagacacttctttacagctttagcattgctaacccacgctcagccgataagataaaccacattaatcgttgagtcgctgacgctgacttcgtgaatcaacgccgcacgctgccggcctttccggcgcatcacaatgtagaaaaatgatgctaaacctcttcagacagatcctgatatggctgctgattgtcgccgccgtcagcctggcggtggattacctgcgcaggcccgcgctgccgcagaatttctccagcatgccgctgcaaacgcttgatggccgaacggtcgatctggcggcaatgagccacgagcgccctttgctgctgtacgtctgggccacctggtgcggcgtttgccgctataccaccccgtcggtggccgctttagccaacgatggcggcaatgtgatgacggtagcgctacgctccggcgacaacgccgctctggcgcgatggctggcgcataaaaaaatggcgctgccgacgatcaatgacgccagcggtcagctatcccaacggtgggaggtgcaggtcacgccgacccttatcgttatctcgcgcggcgaggtgaagtcagtcaccaccggctggaccagcggctgggggatgcgcctgcggctgtggctggcgtcgtagcgcatttccctgcttgcgctgcgcttagcagggccagggatggggtgaggtaaacagatgttgtatcccgggcaaggcgttagccgccccccggaaaacgagttccgattatctcccgcccgccagctccagaaagctgccggtcacgtaggaagccttctcactcagcagccagacgatggcctgagccacctcctccggctgcccgccgcgccgcatgggcagcatcgacttcacgcgatccacgcgccccggctcaccgccgctggcgtgcatgtcggtataaattaagccgggacgcacgccgttaacccgaatcccctgcgccgccacctccagcgacaggccggtggtcagagtatcaaccgcgccctttgacgcggcataatccacatactcccccggcgccccgaggcgcgatgctgcggatgaaacattcacaatcgccccacctttaccgccatgcttgtgcgacatccgctttaccgcctccaggcagcaaaggaagtagccggtaacattggtggccagcacccggttaattcgctcggcgcaaaggctttcaatcgtcccctgggtaaataaaatcccggcgttattgaccagcgcggaaagcggttcaccgaggcggtcgatagcggcgaacatcgccatcacctgcgcttcatcgctgacgtccgcccgtagcgcaacggctttgccaccgctggcgataatttcgttcaccacgccggtcgcggcagcgctattttggtggtaattcaccgccacggtatagccttcctgcgccagcagcagcgccgtcgctttacctattccccggctgccgcccgtcaccaaagctatcgtcatgccattctcccaaaaaataaaggcgccgcagcgcctttaaaagatagtctaatcagcaaattactggtattcgctcatcggcacgcaggagcagaacaggttacggtcgccgtaaacatcgtccagacgcttaacggtcggccagtacttgttgttcagccccgccgggaagaccgccagttcacgggtgtacggatggttccactcgctcaccagttcaccctgagtatgcggcgcgttcaccagcgggttatcctccagcggccattcaccgcctttcacgcggtcgatctcgccgcgaatcgccagcatcgcatcgataaagcggtccagctccactttgctttccgattcggtcggttccaccatcagcgtgccggcaaccgggaaggacatggtcggagcgtggaaaccaaaatcaatcagtcgcttggcaatatccagctcgctgatgccggtctcttctttcagcggacgaatatccagaatacattcgtgcgccacgcgaccgtcgcggccggtatacagcaccgggaacgcgtctttcagccgggtagcgatgtagttggcgttcagaatcgccatctggctcgcctgtttcagcccctctgcgcccatcatacggatatacatccagctgatcggcagaatggaggcgctgccaaacggcgcggcggaaaccgcgccctggcgggtcagcatgccttcaatttgcaccacgctgtggcccggcacaaacggcgcgaggtgcgatttcacgccgatcggccccatacccgggccgccgccgccgtgcggaatgcagaaggttttatgcaggttgaggtgcgagacgtccgcgccgataaagcccggagaggtaatgccgacctgggcgttcatgttcgcgccgtcaaggtaaacctggccgccaaactgatgcaccacttcgcacacttcgcgaatagtctcttcataaacgccgtgggtggacggataggtgaccataatgcaggagaggttcgccgcatgctgctcggctttcgcccgcagatccgccagatcgatgttgccatttttatcgcaggcgaccaccaccacctgcattcccgccatctgcgcggaagccgggttggtgccgtgcgcagagcttgggatcaggcagatatcgcgatgcccttcgttgcggctctcgtggtaatggcgaatcgccagcaggcccgcgtattcgccctgcgcgccggagttcggctgcatgcagaccgcatcatagccggtcagcttaaccagccagtcggagagctgggcaatcatctgatgatagccttcggcctggtcaaccgggcagaacggatgcagttcggcgaattccggccaggtgatcgggatcatctcggcggcggcattcagcttcatggtgcaggagcccagcgggatcatcgcctggttcagcgccagatccttacgctccagcgcgtgcatatagcgcatcatctcggtttcgctgtggtagcggttgaacaccggatgagtgaggatcgcatcgtcacgcagcatgctggccgggatcgaacggctgtccagggccacgtctttatccagcgtgtcgatatccaggccgtgatcgtcgcccacgatggcgcggaacaggttcaggacgtcttcgcgcgtggtggcttcatcgagcgtgatcccgacggcgtgatgaatatcgctgcgcaggttgatctgcagcgcttccgcccgcgccagcacagcggctttatcggcgacgtccacgcacagggtatcgaagtagtgagcatggcggagcttaagaccttttttctgcaggccatcggcgagaatatcggtcaggcgatgaatacggctggcgatacgcttcaggccggccgggccgtggaacacggcgtacaggctggcaatattggccagcagcacctgggaggtacagatattggagttcgctttctcgcggcgaatatgctgctcgcgcgtctgcatcgccatgcgcagcgcggtattacccgccgcatctttcgatacgccgataatacggcccggcatggagcgtttgaattcatcttttgcggcaaaaaacgccgcgtgcgggccgccgtagcccatcggtacgccgaagcgctgggcggagccaaacacaatgtccgcgccctgcttgccgggggcagtcagcagaaccagggccataaaatcggccgcgacgctgacaatcactttgcgcgctttcaggtcagctatcagtttgctgtaatcgtgaacctcgccggtggtgcctacctgctgcagcagcacgccaaagacgtcctgatggtcgagcgctttttccgcatcatcgacaatcacatcgaaaccaaaggtttccgcgcgggtgcgcaccacgtccagcgtttgcggatgaacgtcggcggcgacgaagaaacggttggcgtttttcagtttgcttacgcgtttggccattgccatcgcttccgcagcggcggtggcttcgtcgagcagcgaggccgaggcaatatcgagcccggtcaggtcgagggtcacctgctggaaattcagcagtgattccaggcgaccctgggaaacctccggctgataaggcgtataggcggtataccagcccggattttccagcatgttgcgctgaatcaccggcggcagctgcacggcggtgtagcccatgccaatgtacgacttgaagcgcttgttacgaccggcgatcgccttcagttccgccagcgcggcgaattccgtggttgcttcgcccacctgcggcggcgttgccagctggatatcctgcggcacaatctggccaatcagggcgttaagcgaatcggcgccaacggttttcagcatctcctgctgctgccgggcatccgggccgatgtgacgttcaataaaggcgtcacggttttcaagctggcctaaagtctgggtcatgagcgatggttcctgaacgtgcggtgaatcgtgattgtctgacgggtttgcccggcgagcactgacgctaaccgggccagaagacgcaaatcattcgcgttgcaggaagccaacgcccctgcaacgtgaaggatgaagcgtatttattcgtcttctaacagagcttcatatgcggtcgcatccagcagcgcggcaacctgagcttcatcgctggctttgattttaaagatccagccgccggcgtacggctcgctgttgaccagctcaggggagtcgttcagctcttcattgacggcaacaatttcgccgctaatcggcgcgtagatatcggaagcggctttgacggattcggcaaccgcgcagtctgcgcccgcttctacggcggcgcccacttccggcaggtcaacgaaaaccatatcgccaagcagctcctgcgcgtgctcggtgataccgacggtataggtgccgtccgcttctttacgcagccattcgtgttctttgctgtatttcagttctgctggtacgttgctcatcaattcatctccaaatgggaaatcacaccacggctttgccgttgcgtacaaaaacgggtttcgtcactttgaccggcatttcgcgattgcgaatctgcaccacggcggtttcaccgatgccttccggtacgcgcgctaaggcaatactgtagcccagcgtcggggagaaggtgccgctggtgataatgccttctttctgattgccatcggcatcgctgaagcgcaccggcaggccgccgcgcagaacgcctttctcggtcatcaccaggccgaccagctgttcggtgcctttttcacgctggagttccagcgcttcacgcccgataaaatcacggtcagccggttcccaggcaatggtccagcccatgttagccgccagcggagagacgccttcgtccatctcctggccataaagattcatgcccgcttccaggcgcagcgtatcgcgcgcgccaaggccgcacggcttaacgcccgcgtccagcaggccgcgccagaaatccaccgcctgctcgttcggcagcgcgatttcataacccgcttcaccggtatagccggtagtcgcaataaacagatcgcccgcctgcacgccaaagaacggcttcatgccttccacggcctggcgctgcgcgtcggtaaacagcgtcgccgctttctctttcgcctttggaccctgtacggcgatcagggagagatcgtcacgcacggttatctcaagaccataggattcagactgttgggtgatccaggcgaggtctttttcacgggtggcggagttaacaacgaggcggaaatagtcttcagaaaggaaataaacaatcaggtcatcaatgacgccgccggaggcggtcagcatgccgctatagagcgctttgcccggcacggtgagcttcgccacgtcgttagccagcagatagcgcaggaactcgcggattcggctgccgtgaaaatcgacgatggtcatgtgcgacacatcgaacattccggcatcaccgcgcaccgcatgatgctcatcgatctgggatccgtaatgcagcggcatcatccagccatggaaatccaccatgcgcgcgccgcatagcgtgtgttgttcaaacaacggagtctgttgagccatcttttcctcatcgaataaaacggaaccagccacgatttttggcgtttttgcgccgcgaaaaacgccgccagcatcgctaaaggacgccgacgcaaacgttctctttggcctgaacttaccaccgatatccgcactaaaccataagcctggtcaggacatcacattagcttatgaccaaaatcagccgcagagcctacagagtttttatctacaaaaaagcgattcaatccgcacaaaaccaaactaattagttaaaaaagcagcgaatgatgatattttctgcgaaatgacgagcctaatttctataacaaaaaaaaggtaacattaataaaactaatgcgaaaaacgaggtgaaattagattatttcaaatgagaggggataacccggcgcggcggccgggtgagagaagtgtgacgtacttaacgtaaccaggcgggcaggtcgttgaggcccatcgcttgacggataagctgcggcttcacgccgggcaatgtatccgccagcttaagaccgatatcgcgcagcagcttcttcgccggattgtggccggagaacatgtcgcgaaagccctgcatccccgccagcatcagcgcagcgctatgtttacggctgcgttcatagcgacgcagatacagatgctggccgatatccttgccctgcgcgtgcaggcgcttcagttcgtcgatcagctcggcggcatccataaagccaagattgacgccctgccccgccagcggatgaatggtatgggcggcatcgccgaccagcgccagacgatgggcagcaaactgacgcgcatagcggccggtgagcgggaagacctggcgctcgctctccacggcgcataagccgaggcggttatcgaaggcaatattcagcgcctggttaaaagcggcatcgtccgcctgccgcatgcgctcagcctcttcgggagagagcgaccagacaatcgagcaaagatgcggatcgctcagcggcagaaacgccagaatcccttcgccgtggaacgcctgacgcgccaccgcttcgtgcggttcttcggtgcgaatagtggcaaccagcgcgtgatggtgataatcccagtaggtcagcgggatatcggctttattgcgcaaccatgaattggccccatcggcgccaaccaccagccgggcggttaacatcgtgccgtcctgcaggctaagaaaggcctcgttctccccccacgcaacctgctgcagctgcgccggagccagcagagtgacgtccgcgcagcgctgcgctttttgccacagggcgtggtgaatcacggcgttttcaataatatgcccaaggtggctaaagcccatgctctggtcatcaaagctgatgcggccaaaactgtctttatcccacacttccataccgtggtagcagctggcgcgctgggcgataatatcctgccagacgcccagtttgctcagcagcttctcgctggcggcgttaaccgccgacacccgcagcgccggcggcgcatccgcgcttaacggctgaggcgcggcctgttccagcaccgcaacgcgcagcccgctgccctgcaaaccgcaggcaaccgccagccccaccattccaccgccaacaatagcgacatcaacactttgcacgtttcactccttaacggggaacccaaccgagggtacgctgcgccagcgcatcgcgcgccggggtaaataattccatcgccatcaggccgacgttgcgccccaccaccagcggcgcccagcgattggcgaacagatgcaccagcccatcggtcacgccgacggtggcggctttatctgcggcgcgtcgggtctgatagcggctcagaagcagatagccgcccggatcctctccttctgcctgcgcctgcgccagcatttccgccaggctcatgacatcgcgcagaccgaggttaaatccctgcccggcaataggatgcagcgtttgcgccgcgttgccgaccagcgccagccgatgcgcaaccgtgcggctggctcgggtgagcgagagcggatacacgctgcgctttccggcgtggacgatccggccaagacgccagccgaatgcctgctgaagctcatggcggaagcgttcgtccgaccagctcagcacctcttcacgccgcgactgcggatgacaccacaccagcgagcagcggccctgcgacatgggcagcatcgccagcgggccgtgtggggtaaagcgttcaaacgcgcgcccgctatgcggctgcgcggtactgacgttggcgataatcgccagctgttcatagggttcctgctgccagctgataccgcagcgggcccccagcgtcgagcgcgagccgtcggcggcgaccagcagtttaccgctgagggtttcgccgttgtccagaaccaggctgacgctctcttcgctgcggctgacattttccacctttgccgggcagtgtagcgtcacgcccggcgccttgcgcagctgcgcaaacaggcgctggccgacatcgtgcagctcgaccacctggcccagcgccgccagcccatactcctcagcctcgagcgtcacaaaccccgcgtggccgcgatcgctgacgtgaacgcgctgaatggccgtggcgcagtcggctatctcttgccagatatcaacgcgagccagttgctggcaggtgccggcagccagagcgatggcgcgggcgtcaaagcccggatgctgcgcggaatccggcgcagatgcttcaaccagatgcaccggcagcgtaccgccggtcaggcgagatatcgctagcgccagcgtcgcgccggtcattcctccgccgacgatcaggatgctcatagctggcgcgccgccgccatcagcgcctcgatatcgtccgcttttttcactacgccggcggtgaggttctcattaccgtcttcggtaatgacgatgtcgtcttcaatacgaatgccgatgccgcggtactgggccggcacgtcggcatccgtcgcaatatacagccccggttcaacggtcagcaccattcccggctcaagaatacgcgagcggtcaacgtcatagctgccgacatcatgcacgtcgagccccagccagtggctcaggccatgcataaagaaaggtcgatgggcgttattggcaatcagctcatcaatttcacctttcaggatccccagacgcacgaggccggtaatcataatccgcaccacctgctggttaacctctttaattgaggtacccgggcgatagagcttcagcgaggtttccagagattcaaggacgatatcgtaaatctctcgctgggccgggctaaatttgccgttaaccgggaaggtgcgggtgatatcgcccgcgtagccgcggtattcgcagcctgcgtcaatcagcaccagatcgccgtcgcgcagctcgcactcattttcggtgtagtgcaggatgcagccattttcgccgccgcccacgatggtgttataagaaggaaagcgcgcgccgtgacggttgaattcgtgaaggatctcgccttccagatgatattcgaacatcccgggacggcatttttccatagcgcgggtgtgggccagcgcggagatctcccctgcgcggcgcatgacctccagctcttctgccgatttaaacaggcgcatctcatgcaccatcggccgccagtcaatgaccgagcctggcgcctgcagattctgccgtacgcctttgcgcagtttttccagcgcgttaaacacgatgtcgtcggcgtaggcatattcgccctgggcaaagtagatagcgtcgaggccgttaaggagctggaacagctgctgattgatttcactaaatgccagcgcgcgatcgacgcccagcttcgcgggggcagcttcctgcccgaggcggcggccaaaccagatttcagcggtcagatcgcgcacgcggttaaacaacacgctgtggttgtgcgtctcatcgcttttaatcaataccaacagcgcttctggctcattaaagccggtgaagtaccaaaaatcgctgctctgccggtagggatattctgaatctgcgctgcgtaccgcttccggcgcggcgaaaatgagcgctgcgctgcccggctgcatctgcgccagtagagcctggcgacgagagagaaattcctgctgagtcatgacgccccctgaacgatttaatgaatgattagtgtagcgtcggcttttgaacttccggcgcagtgggtttctgaagagagaaggtgtcgtggcacagcagcgcagcaacgcgtacgtattcgataatctcctccagagacatttcgagctcttcctgatcctcgtcttcgtcatacccgagctgagcaatattgcgcagatcgtcgatggcttcacccgtttcgtctttgattttatccagcttaggctgcgtcacgcccagcccaagcagaaaatggttcacccaacccgcgagcgcatcggcgcgatcgaacacgctcacctcgtcgccatccggcaggtagagctggaataagaaaccgtcatcctccagcgagtcgctggtggcggaatgcatgttacgcagcgcctgcgccagctcgtgaccaaaagccagaccttcgttagtcagatcgtgcaccaacggctgccagctgctgtctttgttgccgccgcacaggatcccgctaatcaaaccgtgcatttcggcaggggttaatcctaccccttgttggttcagtaactggtctacagcgttgtagccaggcatttcgttctgtatagacatgcgcattcgtcatcgttgggaggaatattcatgatatgctaccactttggaccctggtgaaccagaatagggcttgtatcttaaaaccagggtagctatagtgtcgccccttcgcagaccctcccagggcgtgaaggccgcgcagtcaatcagcaggaaggtggcatgtctgcacaacccgtagatctccaaatttttggccgttcactacgagtgaattgcccgcctgaacaaagggatgccttaaaccaggcagctgacgacctgaatcagcggttgcaagatttaaaagaacgcactagagtcacaaatactgagcagctggtcttcatcgccgcgttgaacatcagctatgagttgactcaggaaaaagcgaaaacccgcgactacgccgccagcatggagcagcgtattcggatgcttcagcagaccatcgaacaagcattgcttgagcaaggtcgcataagcgaaagacccgggcagaagtttgaataacactttgcatttaactgtgttagagtaatcgcaagaacaaaatttctctgagatgtttgcaagcgggccagtcccctgagccgatatttcataccacaagaatgtggcgctccacggttggtgagcatgctcggcccgtccgagaagccttaaaactgtgacgacacattcaccttgaaccaagggttcaagggttacagcctgcggcggcatctcggagattcccttctttttcgtttcatccccccctaagttaattttcggcttttgccgtcgtgtattagactacgcctgttggtatcgtttgctcaccgatgagactcaggtatgaccctattgtcagatatcccctttaccaggcagcaaattcgtcagcagatccgccagcgccgacgcgcgttaacgccggagcagcaaacccagttcgccctccatgcggcggacagaatgatggcgtatccgccggttctgctcgcgcagacggtcgcggtatttctttcgtttgatggcgagctggatacgcggccgctgattgatcagctctggcgggcaggcaaacgggtctatctccccgtgcttcatccgttcagccccggcaatcttctgtttctgcactaccacccaagcagcgatctggtggtgaatcgtctgaacatccgcgaaccgaagctcgacgtgcgcgatgtcctcccgcttagccagctggatgtactggtaacgccgctggtcgcgtttgatgccgccggacagcgcctgggtatgggcggcggattttacgaccggacgctgcaaaactggcggcagcatcgcctgcagccggtcggctacgcgcatgattgccagcaggtcgacgcgctgccgacggagcagtgggatatcccgctgccagcggtcatcactccgtcaaaaacctggctctggtaaaacgtccgaacaattgacattgctgattttttcacctaaattcctggataaagggtgagggaggcgaacctccctcctgcattctctctgttaatatgctggccaggcgatgattaacaggataagcagcatgatgaagagtctcatcatcgtccctttccttttagagcccctgcctcggtaggggctttcccgtttcagccccacgctgagtctttatcgtaaatccctttctttcaggcacaacgacatccgacggttttaatcgccgtttgcggcaagcctcgctaagcgtttgagtggcgacgggaaattgcagaagggtctatcaggagaaaaggggcaggtcgatgacctgcccgctggcataaaaggagttagaacagcagacgggcgcggatggtaccaggaatagccttcatcgcctgcagcgcgctctgcgcgacatcttcttcggcttcgatatcaatgaccacgtagcccatttgcggagtggtctgcagatactgcgccgcgatgttaatgccctgcgcggcgaaaatctggttaattgcggtcagaacgcccggacggttttcatggatatgcagcagacggcgcccgccgtgcagcggcagcgacacttccgggaagttaaccgcggagagcgtagaaccgttatcggagtatttcgccagcttgcccgccacttccagaccgatgttttcctgcgcttcctgagttgagccgccaatgtgcggggtcaggataacgttgtcgaactcacagagcggagagttgaacggatcgctgttggtcgccggctcggtcgggaagacgtcgatcgccgcgcccgccaggtgcttgctcgccagcgcatcgcacagcgccgggatatccaccacggtgccgcgagaggcgttgatcagcagcgcgccgggtttcatcagcgccagctcttccgcgccaatcatgttcttcgtggaggcgttttccggcacgtgcaggctcaccacatcgctcatgttcaacaaatcagaaagatgctggacctgagtcgcgttacctaacggcagcttgctttcaatatcgtagaaatagacatgcatccccagcgattcggccagaatacccagctgcgtgccgatatgaccatagccgataatacccagctttttgccgcgcgcttcaaagctgccgaccgccagcttgttccatacgccgcggtgcgctttggcatttgccgccggtacgccgcggagcataagcagcagttcgccgatcaccagttcagcaacggaacgggtattggagaacggggcgttaaacaccgggataccgcgtttcgccgccgcgtttaaatcaacctgattggtaccgatacagaagcagccaaccgcgaccagcttctccgccgccgcgaagatctcttcagtcagatgagtacgggaacgcaggccgatgaaatgggcatcacggatggacgctttcagctcttcgctatccagcgcgcctttatgaaattcgatattggtgtagcccgctgcgcgaaggctgtccaccgctttttggtgcacaccttcaaccagcagaaatttaatcttgtctttttccagtgataccttagccatttccccgtcctgtttttgtcttaactgatgtcgtgcggaacgaaagttcttctcagcaacatatcaaaaaaaactattgcggcaatatgaacgtttgcgtcggcaacctgaagaaatatcaatcagcgggaaatagcaggacaaaacaccagaaagtaaaagaaaggtagattgttactaagacaaggcgcgtaaatgtgacagaagtcaccaaaataggcctggagaaaaaatatttgcgaggaagcgattcgctccctcggatcagactatttagtgatggtttttacaccatcagcggtgccaatcagcgcgacgtccgcaccgcgattcgcaaacaggccgacggtcacgacgcccggaataccgttaatggtattttccagcgcaatagcgtccagaatttccagaccaaacacatcgaggatcacgttgccgttatcggtcacgacgccctgacgatactccggacggccgcccagcttaaccagctgacgcgccacggcgctgcgcgccatcgggatcacttccaccggcagcgggaatttacccagaatatccacctgcttggaagcatcggcgatacagataaatttgtcggcgaccgaagcgataattttctcacgcgtcagggctgcgccaccgcccttgatcatctgcatgtggccgttgatttcatctgcgccgtccacgtaaataccaagacgatcaacgctgttcagatcaaaaaccgtaataccgaggcttttcagtttttcagtagaggcatcagagctggaaaccgccccttcaatctgccctttcatggtacccagcgcatcgataaagtgcgccgccgtcgagcccgtaccgaccccaacgatagtgcccggttgtacatactgcagtgccgcccagcctaccgcttttttcagttcatcttgcgtcatgattatggtccgagatgtgaattcctgaggcgcattatagaacatcaggggggtcattgtccctgcgacggcgatcacacaacgcggtcgccaatttttcatcttcatcaaaaacaaatttatgtcatagtgcgagttaacgaaaagtattagggggcacgccagagcaatgaaacgaccggactacagaacactacaggcgctggacgcggtaatcagggaacgagggtttgagcgcgccgcgcagaagctttgtattacgcagtccgccgtctctcagcgcatcaaacagctggaaaacatgtttggacaaccgctgctggtgcgaaccgtaccgccgcgtcccaccgaacaggggcaaaagctgctggccctgctgcgtcaggtcgaactgctggaagaggagtggctgggcgatgaacaaactggctccacgccgctgctgctatcgctggcggtcaacgccgacagcctggccacctggctgctgcccgcgctctccagcgtgctttccgactcccctattcggctgaacctgcaggtggaagatgagacccggacccaggaacgcctgcgccgcggcgaagtggtcggcgcggtcagtattcagccgcaggcgctgcccagctgcctggtcgatcagctcggcgccctcgactacctgttcgtcgcctcgaaggagtttgcccagcgctatttccccaacggggtgacccgctcggcgctgctgaaagcgccggtggtggcattcgatcatctcgatgatatgcaccaggcctttttgcagcagaacttcgatttgccgccgggcagcgtgccctgccatatcgtgaactcctcggaagcctttgtgcagctggcccgtcagggaacaacctgctgtatgatcccgcatctgcaaattgagagagagctgaacagcggcgaactgattaacctcacgccgggcctgttccagcgccggatgctctactggcaccgttttgccccggaaagccgcatgatgcgccgggtgaccgatgcgctgatcgattacggccataaagtgttgagacaagattaacccccgcaagcaggccggccccgtccggcctgtatgacccaccttctcctgttcatatctttgaaatacatcacaaaataaaacatttcatgcggcaaaaaacgacgcatcgatggctattttttgctggcgacagaggcgatgaaaaagctcaccgtatttgcaatatcccatttcattgcgcatacggagcacaacatgtcagagttacgggagtggcaaacgctcgccaacaaagagctcagccggcgggaaaaaaccgtcgatgccctggtaaaacagacggcagagggcattgacgttaagccgctgtataccgaagccgatcttgataatctggaagtgaccggcaccctgcccggcctgccgcctttcgttcgcggcccgcgcgccaccatgtacaccgcacagccgtggaccatccgccagtacgccggtttctctaccgccaaagagtccaacgctttctatcgccgcaacctcgccgccgggcagaaagggctttccgtcgccttcgacctcgcgacccaccggggctatgactccgataacccgcgcgtggcgggcgacgtggggaaagccggcgtggcgatcgataccgtcgaagacatgaagattttattcgatcggatcccgctggataagatgtccgtatcgatgaccatgaacggcgcggtgctgccgataatggcgttttatatcgtcgcggcggaagaacaaggggttgcgccggaacagctcaccggcacgatccagaacgatattctgaaagagtacctgtgccggaatacctatatttacccgccaaagccctcaatgcgcattatcgccgacatcatcgcctggtgttcgggcaacatgccgcgctttaacaccatcagcatcagcggctaccacatgggcgaagccggagccaactgcgtgcagcaggtggcctttaccctggccgacggtatcgaatacatcaaggccgcgctctccgccgggctgaaaatcgatgacttcgccccgcgcctgtcgtttttcttcggcatcggtatggatctgtttatgaacgtcgccatgctgcgcgccgcacgctacctgtggagcgaagcggtaagcggcttcggcgccaccaatccgaaatccttagccctgcgcacccactgtcagacctccggctggagcctcaccgagcaggatccgtataacaacgtgatccgcaccactatcgaagcgctcggcgccacgctcggcggcacccagtcgctgcacaccaacgctttcgacgaggcgcttggcctgcccaccgacttttccgcccgtatcgcgcgtaatacgcagattatcatccaggaggagtcagagatctgccgcaccgtggatccgctggccggatcgtactacctcgaatcgctgaccgatcggatcgttaagcaggcgcgggccattatgcagcagatcgacgacgcgggcggaatggcaaaggcgatcgaggccggactgccgaaacggatgatcgaagaggcctccgcccgcgaacaatcgctgatcgaccagggcaagcgcgtcatcgtcggcgtcaataagtacaagctggaaaaagaagatgaaacggcggtactggagatcgacaacgtcaaggtgcgcaacgaacagatcgcctcgctggaaaaaattcgcgccagtcgggacgacgtgacggtaaaagccgcgctgaacgccctcacccacgccgcgcagcatggtgaaaacctgctggccgccgccatcaacgccgcccgcgtccgcgccacgctgggcgaaatttccgacgcgctggaggcggcgtttgaccgctacctggtacccagccagtgcgtcaccggcgtgattgcgcaaagctaccaccagtcagacaaagcagccggcgagttcgacgctattgttgcgcaaaccgaaaaattcttcgcggaacgcggccgccgcccgcgcattctgatcgccaaaatgggtcaggatggccacgatcgcggggccaaagtgatcgccagcgcctattccgatctcggcttcgacgttgacctgagcccgatgttttccacgccagaagagatcgcccgcctggcggtggaaaacgacgtgcacgtggtgggcgcctcatctctggcggcaggccacaaaaccctgatccccgagctggtcgatgccctgaaaaaatgggggcgggaagatatctgcgtcatcgccggcggcgtcatcccgccgcaggattacgccttcctgcaggcgcgcggcgtggccgccatttacggccccggtacgccgatgctggagagcgtacgcgacgtcctgatgaggattagccaatatcatgattaaccacgccacgctgacggacgccgtgcggcgactacgcctgggcgagcgggccacgctcgcccaggccatgacgctggtggagagccagcatccccgccaccaggcgctaagcgcacagctgctggatgccattatgcccttcgccggcaacgccctgcgcctcggcgtcaccggcacgccgggggccggaaaaagcacttttctggaagctttcggcatgctgctgattcgccacggcctgcgggtcgcggtgatagcggtcgatccgagcagcccggtcagcggcggcagcattcttggcgacaagacgcgcatgatcgaactggcgcgatcggactcggcatttatccgcccggtgccctccagcggccatctgggcggcaccagcctgcgcgcgcgggagctgatactgctgtgcgaagcggcgggctatgacgcggtaattgtcgaaaccgtcggcgtcggccagtcggaaacggaggtctcccggctggtggactgctttatctcgctgcagatcgccggcggcggtgacgatctgcagggcattaagaaggggattatggagatggcggatatcgtggttatcaataaagatgatggcgagaaccgcgccagcgtggcaatcacccgtcatatgtatgaatccgccctgcatattctgcgccgcaagcacgccgcgtggcagccgcgcgttttgagctgtagcgcgctggagcagcgcggcatcgaagccgtctggctcgcaattcttgacttcaaaaccaccctcaccgacagcggcgagctggaaaaactgcgccagcgccaggcgctggagtggctgcaaaagcaggccgaaaccgaggcgctgcacctgctgtttgcccgaaccgactttgcacgctacttccagcaaacgctacaggcggtgaaaaacaacggcctctcgccgcgcaccggcctgcggcagattagcgaattcctccagaatcattactttgcgtaaaaggatatttatgtcttatcaatatgttaatgtcgaaattatccgcaaggttgcggtgattgagttcaactatagccgcaagctcaatgccttaagcaaggtgtttatcgacgatctgatgcaggcgctgagcgacctcaaccggccggaaattcgctgcgtcattttacgcgcgcccgggggagcaaaggttttctccgccggccatgacatccacgaattgcccggcgggcgccgcgatccgctctcgtatgacgatcctctgcgtcagatcacccgtatgatccaaaagtatccgaaaccggtgatctccatggtcgaaggcagcgtctggggcggcgcgtttgagatgatcatgagctccgatctgatcatcgccgccagcacgtcaacgttctctatgacgccggtgaatctcggcgtgccctacaacctggtcggcatccacaatctgacccgcgacgccggctttcatatcgtgaaagagctgattttcaccgccctgccgattaccgcccagcgcgcgctggcggtcggtattctcaatcacgtggtggacgccgacgaactggaagattttaccttgcagatggcgcaccacatctccgagaaagcgccgctggcgatcgcggtcattaaggaagagctgcgcgtgcttggcgaagcccacaccatgaattccgatgagttcgaacgtattcagggaatgcgtcgcgccgtctacgacagcgtggattatcaggaaggcatgagcgcgtttatggaaaagcgtaaacctgagttcgtcggccattaatcacgccggattaaggagtataaaatgaaacggatgagcgccgatgaagcggcggagattatccagcacgaccagatggtggcgttcagcggattcacgcccgccggttcgcctaaagcgctgcccgcggccatcgctcgccgcgctgacgaattacatcgggcgcagaagccttttcagatccgcttgctgaccggcgcctccatcagcgccgccgccgatgatgcgctatcggcagccgatgccgtctcgtggcgcgcgccgtatcagactgcctccggactgcgacaaaaaatcaaccaggggcaggtgaagtttgtcgatctgcacctgagcgaagtggcgcaaatggtcaactatgggttctttggcgagattgatgtcgcggtgatcgaagcttcggctatcgcgccggacggacgggtctggctcaccagcggtatcggcaacgcgccaacctggctgctgcgggcgaagaaagtgatcattgagctgaatcactaccacagcccgcgggttgccgagctggccgatatcgtgatccccggcgccccgccgcggcgcaacagcatcgccatctttcatgcgatggatcgcgtgggcagccggtacgtgcaaatcgatccgaaaaagattgtcgctgtggtggagaccgagctgcccgacgccggaaacgttctggataacaataatccggtttgtcagaaaattgccgataacgtggtcacctttctgctggaagagatggctcgcggacgcatcccaccagaatttctgccgctgcaaagcggcgtgggcaatatcaacaatgcggtcatggcgcggctgggcgaaaatccggatatccccgcttttatgatgtactcggaagttttacaggagtcggtggttcatctgctggaaacggggaaaatcaccggcgtcagcgcctccagcctgacgatatccgccggttcgttgcgcaagatttacgacaatatggatttcttcgccagccgtattgtcctgcgcccgcaggagatctccaatcatccggaaattatccgccgtctgggggttatcgccctcaacgtggggctggagtttgatatctacggtcacgccaactcgacgcacgtagccggggtgaatctgatgaacggcatcggcggtagcggcgattttgaacgcaacgcctggctctctatctttatggcgccgtccatcgccaaggacgggaagatctccaccatcgtgccgatgtgcagccatgtcgatcacagcgagcacagcgtgaaggcgatcgttaccgagcagggtatcgccgatctgcgcgggctatcgccgctgcagcgcgcccgcgccatcattgataactgcgcgcatccgctctaccgggactatttacatcgctatctggagagcgctcccggcggacatattcaccacgacctcgcccacgccttcgacctgcatcgtaatctgcttgagcacggttcaatgctcggctagccctccgcgccgtcgcgatcttcagtaatatgctgaagcatcgtggcggtatagcgatgatttttcagcgaatagagatactcctgcatatacatcgcgctgccgggcgcgtcgaagtacttcagcttcgccggattcaccagacgccaggcgaagtaaggaataaccgtcaaaaactgcccgcgctctacggcgctaattttggccataaagctgtaggggcgatagataatcgtcgggttgatcccgctggggcgcatatacgcgtccagcatcgcctcaaaattggcccggttctggaaacgcatctgcagccagggcagctcacgtaacagatcctgcggcggcttatcttcataacggcgggaaaccagaaaccccagacgcagcggcgccagttcgctaatggtcaaattttccagctcctgcacgcggggcgaaacatgctgcggcgagataataaaatccagctggcgatcgaacaggttatcaatcacgccattctcgctgaactccacggcctgggtggttacgccatcgtatttatcgcccaggctgatgagctgatcgaaaataatcgttggataggtattgtcgatgccgataacgatgttgcgcgagcggtgcgcggaatagtgaatttcgttatcgatggccgataagcgctgataaatgggaaacagcttctgatagagctcctgccccgctttattgaggctgatgctgttatctttacgggtaaatagcgtatagccgatctgatcctccagcgcagcgatgcttttgccgaagggagacgcggtcatatgaattttttccgccgctctggcaatattattggtctgcgccaacagaatgaaattgcgcatctttttcgaaataaagatatccatgctcacctcatcgtagaacagggatatatccttaccttattcagggaaaagacttttgtcgcgctctcaattttacagatagtgacagaaaaaacccggcgcgaaggccgggcgacaggattactgtgcggctttgggttcttcagcgggtttcgccggttccgcagatgctggcgcaggctgggtcggctgcagctcaaacaccacgtccacctggtcatcaaactgaatggtcgcctgctcgtaggtttcctgagcagaaaccggcgccgcatcggctttcatcatccgcaccatcgggctcggctggtagttggagacatgatagcgaacgctgtagacgggccccagtttgccgtggaacccggtagccagctcctgagcctggtgaatggcatcatcaatcgccgctttacgcgctttatctttataagcgtccggctgcgccacgcccagtgaaaccgaacggatctcattcaggccggctttaagcgccccatctaacagaccgttgagcttatccagctggcgcagcgtcacttcaacgctacgcaccgcgcggtagcccttaagaatgcttttaccgttctgatagtcgtaatcaggctgggtacgcaggttagctgagttaatgtctttcttcgcaatgccgctcttctccaggaaggagagatactgggccacgcgctcatcggcctgttttttagcggatgccgcgtctttcgcggagacgtttacttcaatcgccagcgtagcgatatcaggaaccgcagcgacgctggcggtacctgaagtgacaatatgtgggccgtttggcaactcatttgcctgaaccgccattgcgctaaatccgagtgccgccgccagggccatgacttttaacttcactgtcgtttctccatcttacattggtcgtctatacgcagacgcatgcctgcaagggtcgtctatacgcagacgcatgcctgcaagcttagcgcgtacgcggagaaagtccatcggacaaggcttagttaagcagcgcctgaacatgagcgaagccgtccttcgccagctggaaggcaatgacccacatcaccagaccgaccagcacgttgataacgcgctgcgccttcgccgtacgcaggcgcggggcgagccaggcggccagcagggccagcccaaagaaccataagaatgaggcgctgatggtacctaaggcaaaccagcgcttcggctccatcgccagctgcccgccaaggctgccgagaaccacaaacgtatccagatacacgtgcggattcagccaggtgaccgccagcatggtgacgataattttccagcgcccctgcttcatcacttccgcgctggccagcgccagattgctgctcaaggccgttttcagcgcgccaaagccgtaccacaataaaaaagcgacgccgccccaggtcaccagcgccagcagccacggtgactgcatcagcagcgcgctgccgccaaaaatcccggcgcagatcagcagcagatcgctgatggcgcacagcagagcaatcatcaggtggtactgacggcgaatgccctgattcatcacaaaggcgttttgcggaccgagcggcaaaatcatggccgctcccagggcaagaccctgaaagtaatacgataacatcggaagtgatttccactgaaagagtcaatgccggggaatatagcgcgcggaaatcattagaggaaattgaaaattttaatcgttaataagaactactaatagggcgcagaaaaaaggccggacgaaccggcctgtataaaagaggagaattactctgctttttcctgcggacgaatgacgtgaacgtccatctgcggatacgggaagccgatgccgttggcgtcaaagtcgcgcttaatacgctccagaacgtcccagtatacgctttgcagatcgctgctcttactccatacgcgcaccacgtagttcaccgaagaagcgcccagttcattgagacgcacggtcatttcacgatctttgaggatacgttcatccgattcgatgatattggtgagcagctgcttcactttatcgatatcagcgtcgtaggccacgccgatgataaactcgttgcggcgcaccggctcgcgggagaagttgatgatattcccggcaatgattttaccgttcggcaccaccacgattttgccatccgcgctgcgcagggtcgtggagaaaatctgcacgttcagcacggttcccgcgataccgccaaggtcaacgtattcaccggcgcggaacgggcggaagaccaccagcaggacgccagcggcaaggttagacagcgagccctgcagcgccagaccgacggctaagcccgcggcgccgagcaccgcgatcaccgaggcggtttgcacgcccacgcggccgagagcggcgatcagggtaaaagcaataacggcgtagcgtaccagcgcagagagaaaatcggcaacggtggcatcaatatgccgcgcccgcatcaggcgattgacggtgttggaaacaatccgcgccacgatcaaaccgacaataataatcgcgatagccgcgacaatgttgacggtatagctcagcagtaatgcctgattgcgcaccagccatgaaccggcgttatttatgctatcgacaacgttcaaatcttccattcaactttccttatggatacccggacggggaaaaaataaccaaacctgataattacaaacaggttaagggtaaacaataagagtgcgttttgccaaattgatcacatttatttagcaacatttcatgttgttcagataataaaaaagcccgcatttctgcgggcttccgggtaagcaacaaacctttcttacagaacgtcgatcgcgttcagctctttaaatgcctgctccagacgggtcaccatggacgtctgtgcagcgcgcagccatacgcgcggatcgtagtatttcttgttcggctggtcttcgcctttcgggttgcccagctggccctgcaggtaagcttcgttagttttgtagtactgcaggataccgtcccaggttgcccattgggtatcggtatcgatgttcattttgatcacgccgtagcttacggagtctttgatttcctgagcggaagaaccggaaccaccgtggaatacgaagttcaggctgttgtgcggcaggttgtgtttcttagaaacgtattcctgagagtcgcgcaggatagtcggggtcagtaccacgttgcccggcttgtaaacgccgtgtacgttaccgaaggaagcggcgatggtgaaacgcgggctgattttgctcagctcggtgtacgcgtaatcaacgtcttccggctgggtgtacagagcagaagcgtccatgtggctgttgtccacgccgtcttcttcgccgccggtgcagcccagttcgatttccagagtcatgtccattttggccatacgcgccaggtacttagaacagatctcgatgttttcgtgcagggactcttcagacaggtcgatcatgtgagaagagaacagcggtttgccggttgcggcgaagtgtttttcacccgcgtcgagcagaccgtcgatccacggcagcagtttcttagcgcagtggtcagtgtgcaggataaccggaacaccgtagtgctcagccatctgatgcacgtgatgcgcgccagagatagcgcccaggatggctgcgccctgaggaacgtcagttttcacgcctttgcccgcgatgaacgcagcgccgccgttagagaactgaacgataaccggagaacgaacttttgcagctgcttccagaacggcgttgatggaatcagtacccacgcagtttaccgctggcagagcaaagttgttttctttagctacctggaacactttctgaacgtcgtcgccagtgatgacgcccggttttacgaaatcaaaaattttagacatgttacgtagtcctgtatctgtatcttcgaccgttgaagaaggttcgcgagcttttacgcgcgctgaaaaacaggcgggtctccccgcctgaactgaattactgcttagcgcgctcttcgagcatggctactgccggcagaactttaccttccacgaattcgaggaatgcgccgccgccggtggagatgtaggagattttgtcagcaataccgaacaggtcgattgctgccagggtgtcgccgccgcctgcgatggagaacgcttcgctgtctgcgatggcgttagccacgatttcagtacctttgcggaagttcgggaattcgaacacgccgaccgggccgttccacaggatggttttcgcgtttttcaggatttcagccagtttctctgcggaagcatcgcccaggtccagaatctgctcttcatctttgatgtcgttaacagatttcagggtagcggttgcggtttcagagaactcggttgccacgcgaacgtcagtcggaaccgggatatcgcaggtcgtcagcaggcgtttcgcttcgtcaaccagatcggcttcgtacagggacttaccgacgttgtggccctgagcggcaacgaaggtgttggcaatgccgccgccgacgatcagctggtcagcgattttagacagggagtccagaacggtcagtttggtagaaactttagaaccacccacgatagcaaccatcggacgagccggttctttcagcgctttacccagggcgtccagctcagcggccagcagcggacctgcgcaagcgacgtcagcgaatttgccgataccatgagtagaagcctgcgcgcggtgagcggtaccgaacgcatccataacaaagacatcgcacagcgcagcgtattttttcgccagcgcttcgtcatctttcttctcgcctttgttaaagcgaacgttttccagaaccaccagctcaccggcagcgacttcaacgccgtccaggtaatctttaaccagacgtaccgggttagacagtttgtctttcagatagttaacaaccggcagcagagagaattcttcgttgtactcgccttcggtaggacgacccaggtgggaagtgaccatcactttcgcaccctgtttcagggccagttcgatggtcggcagagaagcacggatacgcgcgtcgctggttactttcccttctttaaccggtacgttcagatccgcacggataaaaacgcgtttaccagccagatccagatcggtcatcttaattacagacatggtgaatcctctcgttgattcttgataaagttttgcaggcgcctgagcgccttacctgaaaccttgtgcggccatcgctaacgtggtgtcgagcatccggttagcaaagccccattcgttatcgcaccagaccagcgttttgatcaaatgcgcgccacttacccgcgtttgtgtgccatcgacaatggcgctatggggatcgtggttgaaatctatcgagactaacggcaattccgtatagtcaactataccatgaaatgcacccagtgctgctttttgcagcaactggttgacttcacttgcttttaccggttttttcaccgttacgctaaggtcgatcgccgtcacattaatcgtcggtacacgaaccgcgatcgcttcaaagcgatcgttaaactgagggaaaaaacgcgtgatccccgcagcaagcttagtatcaaccgggatgattgattggctggccgctcgcgtcctgcgtaaatccggatgccaggaatcaatgacctgctgatcgttcattgatgagtggatcgtggttaccgttcctgactcaatgccataggcatcatctaacagcttaatgaccggaataatgcagttggtggtgcaggaggcgttggagacgatacggtgctcggttctgagctcagcatgatttacgccaaaaacgatcgtcgcgtcgaggtcgttgccgccagggtgtgaaaaaagcacttttctggcgccggcctgaagatgggcttcgccatgctcgcggctgccgtaaacgccggtacagtcaagcaccacatcaaccgccagttcccgccagggcaacgcctcaagggaagattcatgcaaaagacgaatggcatcgtcgccaacaaacagctgctctctctcctgacgtacatcccaggcaaagcgcccatggctggtgtcatatttcaataaatgcgcgatgccggcagcatccgccagttcattgattgccaccacggtaatttccgcacgacgcccggattcatacaaagcacgaaccacgttacgcccgatgcgaccgaagccattaatcgcaatgcgtatggtcataggtctcctgcaaggctatccatgatatgaggtggctgacagagtaatgcagcaacgctctaagggaaaccttacctgtcgcaaactgcgactgattgattaattgtcgaacatttagacgactgaaacgcttcagctagaataagccaaacaaggaataaaaggaatgattgtccagccggagaaaccatttatctgacttacatcacacttttaccctctctgccgcggaatttattccctattccacaatgacgaataagcgtagcaaaatcttttcgttgccgggcggcaaacactgatttatatcagaaactataccgtttagcggcgatatgatgaccgttacgtccgagtctcggagtccctcgaaaaaatgacaatcccccacttgcagccctctgcggctcgttactatgcgcttcgcttacttccgggcgaggaggttttttcacgcctgcgcgccttcatacaagagcaacagattcaggctgcctggatagccggctgtaccggcagcttaagcgatgcggcattacgttttgccggccaggatgagaccacttttttgaccggaacctatgaggttatctccctgaacggcacgctggaatggcaaggtgaacatctccatttagcgatatccgatccgcaaggcgccatgctcggtggccatatgatgcccggctgtaccgtccgcaccacccttgagctggtgataggcgaactgacctccctggcgtttagccgtcagccgtgcgcggtttccggctatgacgaactggtcatttcatcccgataacttttccccttaaagaggtttatatggctcgtcgccaatttaccagccagtccctggtgctgattgcgatcgccgtcgccatcaatatgatcggcggacagctcatcagtctgttaaagcttcccatctttctcgattcgatcggcaccttaatcagcgcggttttactcggcccggtcattggcatgttgaccgggttactgaccaacctcctgtgggggctgctgaccgatccgattgccgccgcctttgcgccggtggcgatggtgattggtctggtcgccggatggctggcgcgcgcgggatggttccgcaccttaccgaaggtggtcattagcggcgttgtcattaccctcgccgtgaccgcggtcgccgtaccgctgcgtacggcgctgttcggcggcgtgacgggcagcggcgcggatctgtttgtcgcctggatccattcggcaggtcagaatctgctggaatcggtggcgattaccgtcttaggcgctaatctggtggataaaatccttaccgcgattatcgtctggatcctgctgcgccagctgccgctgcgcacgctgcgtcagtttcctgcgatgtctgccgtacgctaatgcacccttttacgtcattaaccctctgggcgctggcggcggcgactacgctgctgctacccgcagagacggcgctgccggtgtatagcgctgcggcgtttctcagcttgctgctgttcagggcgacgcggcggcgggcaaaatacgtcgcctggctcctcttctcgctgggcattggcctgtggctggtccacggcggctggtttacccagtggctgagcggccacccccgcgacccgcagcgctgggccagcgccatcacgctgtggctgagaattctggcgattgtttcaacgtcacagctgtggatggagtacgtaccggtacagcgctttattcgcgccctgtttgcttcacgcctgccgccgggcgtcgcttatctgttcgctggcccactgctggttgtcgaacagctaaagcgccagctgacgattatccacgaagcccaacgcgcccgcggcgtaccgctggacgagaacggctatcagcggctgcgcgctatgcctgcgctcattatccctctgacccacaacgcgcttaacgatctggcgatacgcggagcggcgctggatatgcgggcatttcgtttacatcgtcggcgcaccacgctttgggcgccgaaagacagcgccttacaacgtctggcgcgttacggcatgctgctggcgatggtcgctgaagctggagcctggctatggttacgttagaacaattccgctaccacccgacccaggcggcgcgatctgcggcatgctttgatttccattattcgcagcccggcatggtggcgatttttggcgatagcggcagcgggaaaagcactctggcgcagattatggcgggctggtatccggattttctgcccggcgatatcgaaggtaaaggcaccctgcttggtatccccatcggccagcaatcgctggtcgaacgggcgcaggccatccagctggtccagcaatcaccctatctccagctttccggctgtaccttcagcgtcgaagaagaggtcgcttttggccctgaaaatctctgcctcagcgaagaggagattatgcgccgtattgacgaagcgctgacgctgacggcgtgccaggcgttacgacatcgccacccctccacgctatccgggggagaaacccagcgcgtggcgatcgcctgcgcgctggctatgcggccaacgctactgatccttgacgaagcctttagccgcctgacggcgcaggcaagcgctatgcttctggagcgcctggggcactgggcgctggcgcagcgttcgttgattatcctttttgaacgccccccttcgccttttcttgcctggtgtcagcagggatggcgactgcacgatggagcgctttccccgctatgctaacgttgaatcaggtgacctggcgctggcccggcgcgacggctgactgtctgcaaaatatctcgctggcgctcggccagggggaatggctggcgctcaccggcgataatggcgcggggaaatccaccctgctgcgggtgatggccggactgctacccgccacgtccggtagcgtcaatttgctggataagccgattgcgcaatacaaaaaccgtcaacgcgccaatatcatcggcgtgctgtttcaggaggccgaaaaccagctcttccacagcaaagtcgcggaagaggtcgcctttgggctgcggctccagaaattgccttctgcggaggttgcgcaacgcaccgcggcggcgctgaaattatgccggctggagagcgtagccgacgcgcatccgctggatttacataccgcccaacgcaggatggtcgccgtcgcctctctggaagccatggcgccagaaatactgctgcttgacgaacccagccgcgattttgaccagcactggctggcaatatttgaagcgtggctggcggtttgccgcaaaagagggaccagcgtagtggccatcagccacgatgaggcgtttacacggcggcacttttcccgccgggtgcttctggaaaaaggtagggtgctgaggatggtctgaaaaagaaacgggccgccagagcgacccgttttttacggcggcagccagagtttttacccggaggcggtgctgcgcacctgtccgggctacccgaccgcgctggcccgtagcccggaggcggtaaaagaactacagcagcgctttcgctttcgcgaccacgttgtccacggtgaagccaaactcttcaaacagctgctccgccggcgcagactcaccgaaggtggtcatgccaacgatcgcgccattcaggcccacgtatttgaaccagtagtcggcgatacccgcttcgatggccacgcgcgcagagacggctttcggcagcacggcttcacggtaagcggcatcctgcttgtcgaacgcgtcggtggacggcatggaaaccacgcgcgccttcacgccttcggcagtcagtttttcgtaagcgccaaccgccagctccacttcagaaccggtggcgatgaagatcagctccggctgtcccgcgcagtctttcagcacgtagccgccgcgggcgacgttcgccagctgctcttcggtacgctcctgctgcgccaggttctgacgggagaggatcagcgcggtcgggccgtcctgacgctccacgccgtatttccacgcaatggcggattccacctggtcgcacggacgccatgtggacatgttcggagtgacgcgcagggaagccacctgctcaaccggctggtgcgtcgggccgtcttcgcccagaccgatggagtcgtgagtgtagaccatcacctgacgctgcttcatcagcgccgccatacgtaccgcgttacgcgcgtactcgacgaacatcaggaaggtggaggtgtacggcaggaaaccgccgtgcagggcgataccgttggcaatcgcggtcataccgaattcacgcacgccgtagtggatatagttaccggcagcgtcttcgttgatggccttagagccggaccacagggtcaggttacttggcgccaggtcagcggagccgccgaggaactcaggcagcagcgggccgaaggcttcaatggcgttctgcgacgctttacggctggcgattttcgccgggttagcctgcagcttcgcgatgaattcgttcgctttcgcgtcgaaatcagccggcatctcgcctttcatacggcgggtaaactcggcggcttcctgcgggaaggctttggcgtaggcagcgaatttctcgttccacgcggactctttcgcctggccggcttctttggcatcccactgggcatagatttcagacgggatttcaaacgccgggtgtttccagccgagcgcttcgcgggtcagcgcgatttccgcgtcgcccagcggcgcgccgtgggagtcgtgggtaccggctttgttcggcgaaccgaaaccgatgatggttttgcacatcagcagggacggtttgtcggtaaccgcacgcgcttcttctaccgcgcgtttaatcgagtcagcatcgtgaccgtcaacgccgcgcaccacgtgccagccgtaggcttcaaaacgcttcgcggtgtcatcggtgaaccagccttccacgtgaccgtcgatagagatgccgttgtcgtcatagaacgccaccagcttgcccagtttcagggtaccggccagggagcatacctcgtgagagataccttccatcatgcagccgtcgcccatgaacgcgtaggtgaagtggtcaacaatgtcgtggcccgggcggttgaactgcgccgccagagttttctccgcgatggccataccaaccgcattcgcaataccctgccccagcggaccggtggtggtttccacgcccgcggtgtagccgacttccgggtgacccggcgttttagagtgcagctgacggaagttcttcagctcttcaatcggcagatcataaccggtgaggtgcagcaggctgtaaatcagcatggaaccgtggccgttggacaggacaaaacggtcgcggtcggcccatgacgggttctgcgggttatgattcaggaaatcacgccacaggacttcggcaatgtcagccatacccatcggggcacccgggtgaccggatttggctttctgtactgcgtccatgctcagcgcacgaatagcgttagcaagctctttacgtgaggacattttgactccagatcggataatgaaggccatgcccgcaacgacttgacgacagcgcgttttgggctacgccggaaaaaagtgtgaacaatgtaacctaagcggcaaagcatgtacatggagcatccttttgccgtttaagaaatctctggaacacgttgtgctacggcgtaatcctctcgcccgcattctcatatagtatttataatttgcacaggatacggcaggcagccatcgccgttttttcggataaataaccataagattgtggaagataaaaaatgaaaattcgctcagctcttcttgcccttgggatcgcagccacgcttaccggatgccagaacatggattccaacggcctgcttagctccggcgcggaggctttccaggcttattcactcagcgacgagcaggtgaaagccttaagcgacaaagcctgtcaggagatggatgcgaaagcgactatcgcgcctgccagcagtgaatacagcaaacgcctgagtaaaatcgccgccgcgctgggggacaacatcaacggccagccggtgaactacaaggtgtatcaaactaaagacgttaacgccttcgccatggctaacggctgcatccgcgtttacagcggactgatggatttgatgaatgataatgaagtcgaagcggttatcggccacgaaatgggtcacgtcgcgctgggccacgtgaagaaagggatgcaggtagcgctgggcaccaacgcggtacgcgcggcggcggcctccgcgggcggcatcgtcggcagcctgtcgcagtcgcagctgggcgatctgggcgagaagctggtgaactcgcagttctcccagcgtcaggaatcggaagcggacgactactcgtacgatctgctgcgcaagcgcggcattaatccggcaggacttgccaccagcttcgagaaactggcgcagctggaagccggacgccaaagctccatgtttgatgaccacccggcatcggaagcccgcgctcagcatatccgcgatcgcatgaaggccgacgggattaagtaagccccggctccccaagtggcataacaaacagaattgggggagcttatcggtatgccgggtagcggctcacaccttacccggcaacacaacctgcacttattcttaggccggtgcaagcactgcgcctccaggtcgttcgaggaaaacgcacgctgtgagcgacctgattattcgccttttttcgccgcctgaatgtagagcatttccagcgccagcgtcgccgccgccagggcggtgatttcggactggtcgtaggccggagcgacttccaccacgtccatgccgacgatgttcagatccttcaggccgcgcaccagcttgatcgcacgatcggaagtcaggccgccgatcaccggcgtaccggtacccggggcaaacgccggatccaggcagtcgatatcaaaggtcaggtacaccggcatatcgccgacgatctgtttcacctgcgcaatcacatcgtcaacgctgcgatcgttaacctggcccgcatccagcaccgtgaagccgttgtctttatcaaactcggtacggataccgatctgcaccgaatgattcggatcgatcaggccttcgttgggcgcggtgtagaacatggtgccgtggtcaaattcgcagccattggcgtaggtatcggtatgggcgtcgaaatgcaccagcgccattttgccaaagtgcttcgcgtgagcgcgcagcagcggcagcgtcacaaagtggtcgccgccaaaagagagcatgcgttttcctgccgccagcagtttttccgcgtgggcctgcagcttttcactcatttcacgcgcgtcgccgaaggcgtaaaccagatcgccgcagtccacgacgttcaggcgctcgcgcatgtcaaaattccacgggaagcggttgtgctcccacgcaaggttcgtcgacacctggcggatcgccgccgggccatgacggccgcccgcgcgtccggaggtcgccatatcaaacggtacgccggtgatgacccagtccgcatcgctgtcgtacggcatgaaattcatcggtagacgcagaaaaccaaatgcgttggataccaaggagttatcgtattgatgacctaaggtgctcatgggtatgacctcttttacagtcgttgtattgaaatacaaatataaaaaaacccttccgcgtcgttaggcccgacgaggaagggtttgaatgagtttactgcttagttgggcgaattatcgccgtaaatgtctacgcgttcaagtgagtctggcaagtggtgaaccaggcctctctctccctcttccctctccgctacggagagggcatagatcactcgtcttccagataagtgtagccgtataaaccggcctcgaactcttcaaggaactgctgctgcaggtcagcgtcgagatcggtctttttcacctgatcgcggaactgggtcaacagcgtgttcggatcgagctgcacgtactgcagcatatccgcgacggtatccccttcatcagacagctccacttcgacgctgccgtcagggaagacaaacacgtcgacggcttccgtatcgccgaacaggttgtgcatattgccgaggatctcctgataggcgcctaccataaagaagcccagcatcggcgggttatccggatcgtattccggcatcggcatggtggtcgcaataccgtcgccatccacatagtggtcaatcgcgccgtcggagtcgcaggtgatatccagcagcaccgcgcggcgttccggcaccatattcagcccttccagcggcatcaccgggaatagctgatcgataccccaggcgtccggcatcgactggaacagggagaagttgacgtagatcttatccgccatacgctcctgcagttcgtcgataatcgggcgatgcgcgcggttgctgggatcgagctgtttctgcacttcatggcacatattgagatacagctgctcggcccaggcgcgctcctgaagattaaaggtgccggaggagtagccgatatgaatatcgtgcagatccatctggctgtcgtgcagccattcgcgcagcgagcggcgattgccggtttcctgcatctcctgccaggtttcccacatgctttgcagcggacgcgcggcgtcttccgcgggcggggtcgcctcggtatattcgttacgctcaacgccgataatattcgataccagcacggtgtggtgcgccgtgaccgcgcggccggattcggtgatcaccgtcgggtgcggcaggccgttctcttcacaggcatcgccaatcgcccagatgatgttgttggcgtattcgttcaggccatagttcaccgagcagtcggactgcgaacgggtcccttcatagtcgacgccgagaccgccgccaacgtcgaagcactgaatattcacgcccagcttgtgcagctcaacgtagaaacgcgacgattcacgcacgccggtggcgatatcgcgaatattggccatctgcgagccaaggtggaagtgcagcagctgcaggctgtccagatgcccggctgagcgcagaatttcaaccagctgcagaacctgggtcgccgcgaggccaaatttggacttttcgccgccggaggactgccacttaccggagccctgcgaagccagacgcgcgcgcacgccgagacgcggcaccacgttcagccgctcggcctcttccagcacgatggcgatttcggacattttctcgatgaccagatagaccttgtggcccatcttttcgcccaccagcgccaggcggatatattcacggtctttataaccgttacagacaatcacgctgcgggtcataccggcgtgcgccagtaccgccatcagctcggccttggagccggcttccaggcccagcggctcgccggagtggatcagcgattcaatcacgcgacgatgctggttaaccttgatcggataaaccaggaagtagtcaccgttatagccataagattcgcgcgcgcgtttaaaggcggcgttaatcgaacgcaggcggtgctgcaaaatctgcgggaagcagaacagcgcaggcaggcgctgcccctgagcttcacgcgctttcaccagctcggcaaggtcaacgcgcgcttccgggacgtcaggatccgggcagacgctaatatggcccagttcgttaacgtcgtagtagttattaccccaccaggcaatattgtaagtacgtagcatcttgctggcttcctgggagctcatcgcaacctcctgcatggaacgtagtacaccgtgatcgcctgctgacgaaggcgaagataaggacatgtcgtcagacatagcgaacctcaaatttagtaacaagtgtaaaacagttgactactatcgcaatccgaagaagcgataacaacccataaacagtccgaaatcccagtagatagtgctggtcttgcggctgagcgaccggtttcttattcatatcatcgtaaaacacgtacccgaacggagtatgacagtccggagaaaccacgagaaaacccttgctatcgcaagagcgcccttgttcagttttccagcagcctgccggcccgggaatcctgagaagcgccgagatgggtagaacatcggctggtttgcatgagagagatgcggattgaggagtagtgacgcgcgacggaacgacgcgacgaatcaggcgaaaaacgtgggttcattatctggtatcacctccacactgccccgagtcgggccagcgacaagccaaagctataggttccggacagccagcgaaaacgccgctgcgggactctgtcaatagagactgcttaacccggctggaagtggcgtcacgaggtgagtgctcgtacgctgttttaatgagccgcgcgcggcgttttataccgagaagcggggtaaaaagcaaaataaaaatatgcgcgttgccgggtattgtcaggaaaaattgccaccgccctttttctataaatgcgacgaatatcaaaaaaggctggaaatggggtcaagaactgccctaaaatagccgtccagaagttaatccatctatactgattaacactcagactgctcgtgtcactacctgcaagctttggtagagtcatccgtcaaagccattctacacaacagtatgagctacccgaatcgtccacaggtgaaataaaacatggcaaaacacctctttacgtcagagtccgtatcagaagggcatcccgacaaaattgctgaccaaatctccgacgccgtgctggatgcgatcctcgaacaggatccgaaagcgcgcgtagcatgtgaaacctacgtcaaaaccggtatggttctggtcggtggtgaaatcaccaccagcgcatgggttgatatcgaagagatcacccgcaacacggtccgtgaaattggctacgtgcattccgatatgggctttgacgccaactcctgcgcggtgctgagcgccatcggtaaacagtctccggacatcaaccagggcgttgaccgcgccgatccgctggaacagggcgcgggcgaccagggcctgatgtttggctacgccactaacgaaaccgacgtgctgatgcctgcgccgatcacctatgcgcaccgtctggtgcagcgtcaggctgaagtgcgtaaaaacggcaccctgccgtggctgcgcccggatgcgaaaagccaggtcaccttccagtacgacgacggcaaagttgttggtattgatgcggtcgttctctccacacagcacgccgaaagcatcgatcagaaatcgctgcaggaagcggtgatggaagagatcatcaaaccggttctgccgaccgagtggctgaacagcgcgaccaaattctttatcaacccaaccggccgttttgttatcggcggccccatgggcgactgcggcctgaccgggcgtaaaatcatcgttgatacctacggcggcatggctcgtcacggcggcggcgcgttttccggtaaagatccgtctaaagtggaccgttctgcggcctacgcggcgcgctatgtggcgaaaaacatcgttgccgccggcctggccgatcgttgcgaaatccaggtttcctacgccatcggcgtggcggagccaacttcaatcatggttgaaaccttcggtaccgaaaaagtgccttctgagcagctgaccctgctggtgcgcgagttctttgatctgcgtccgtatggcctgattcagatgctggatctgctgcacccgatctacaaagagacggcggcatacggccactttggccgcgagcatttcccgtgggaaaaaaccgacaaagcggcccagctgcgcgaagcgtccggtctgaaataagacgccgctctcctcactttcaaggccagccccgcgctggcctttttattttacgcccctcagccgcccggcataccgcctgcaacatccctattatggaagcgattacatcatatgcagagcaaaccttttccgttattgcatgcaaaatgtaataagacttcactttgttacacaatatttcagtaaagtccgattagcgcttttaatttcttgagctaaacttaattaatatactgatttaaatgcgtttatagtcattacgtttctttactctagtgtaaccgattacacagccgtgattactatcacatttttttacgacgtatttacctaccctacgcatcgacaagatcaataactcaaccggagggcgttatgcctgacaacaaaaaacaagggcgttccaacaagacgatgacgttctttgtctgtttcctcgccgcactggctggcctgctgttcggccttgatatcggtgttattgcgggtgccttaccctttattgccaacgagttccagataagcgcccacactcaggagtgggtggtcagctccatgatgttcggcgccgccgtcggcgcggtgggcagcggctggctctccttcaaactcgggcgtaaaaaaagcctgatgattggcgccatcctgttcgttgccggctcgctgttctccgccgccgcaccgaacgtggaagtgctgctgctctcccgcgtgctgctcggcctggccgtaggcgtcgcctcctacaccgccccgctgtatctgtctgaaatcgccccggaaaaaatccgcggcagcatgatttcgatgtatcagctgatgattaccattggtattctcggcgcctatctttccgatacggcattcagctacagcggcgcctggcgctggatgctcggggtgattattatcccagcggtgctgttgctgattggcgtggttttcctgcctgacagcccgcgctggtttgccgctaagcgccgctttgtcgacgccgaacgcgtcctgctgcgcctgcgcgacaccagcgctgaagcgaaacgcgagctggatgagatccgcgaaagcctgaaggtaaaacagtccggctggtcgctgtttaaagaaaacagcaacttccgccgtgcggtattcctcggcgtcctgctgcaggtgatgcaacagttcaccggtatgaacgtcatcatgtactacgcgccgaagatttttgaactggcgggctataccaacaccaccgaacagatgtggggaaccgtcatcgtgggtctgaccaacgttctggcgacctttatcgccatcggactggttgaccgctggggccgtaagccgacgctgatcctcggctttatcgttatggcgctcggcatgggcgtgctgggcagcatgatgcatatcggcatccactccgccacggcgcagtactttgccgtcctgatgctgctgatgtttatcgttggctttgcgatgagcgccggcccgctgatttgggtgctgtgctccgaaatccagccgctgaaagggcgtgatttcggtatcacctgctcaacggccaccaactggattgccaacatgatcgtcggcgcgaccttcctgaccatgctgaactcgctgggcagcgccaacaccttctgggtctatggcggcctgaacatcctgttcatcttcctgaccctgtggctaatcccggaaaccaaaaacgtttcgctggaacatatcgaacgtaacctgatgaaaggccgtaagctgcgcgaaatcggcgcgcgcgactagactaacccgcttcctccctcccgggaggaagcttcttcttgctctcctcatcccgccgcactattctctggcgctatgaaaacaccccgaattcccattgcccttcaacaggccgttatgcgcagcctgcgggaaaatcttgccaaagcgaacctcaagctgggacgaagctaccctgaaccggtgctggtttatcagcagcggggaacctccgccggtaccgcctggctggagaaaaacgaaatccgccttaacccggtgctgctgctggaaaaccagcaggcgtttattgatgaagtcgtgccgcacgagctggcccacctgctggtatggaagcactttggccgcgtggcgccgcacggcaaagagtggaaatggatgatggaaagcgtgctgggcgttccggctctgcgcacccatcgtttcgaactcgattcagtgcgtaaaaataccttcccctaccgctgccagtgccagcagcaccagcttaccgtccgccgccataatcgcgtgatgcgcggggaggccacctatcgctgcgtgcgctgcggagatgttctggtggcggaaaagtaatctccggaaataactggaaattttctgatctgactgattgcgtctggcaatcacattcgatacgttgcgggctcgttttgacacggagttaacgatgtcccgtattcatatttttgctgccgcgtttctcagcgcggcggtatgcgccccgcttgcagcggaaggaatcaacagtttttctcaggccaagaccgctggggtcaaggtcaatgccgacgcccccggcgatttctactgcggctgtaaaatcaactggcagggaaaaaagggggttatcgacctggaatcttgtggctataaagtgcgtaaaaatgaaaatcgcgccagccgggtcgagtgggagcatgtggttcccgcgtggcagtttggccatcagcgtcagtgctggcaggacggcgggcgcaaaaactgcgctaaagatccggaataccgcaagatggaaagcgacatgcataacctgcagccagcggtcggcgaggtcaacggcgaccgcgccaactttatgtacagccagtggaacggcggcgaaggccagtacggccagtgcgcgatgaaggttgattttaaagataaagttgccgagccgccggctcgcgcccggggcgctatcgccagaacctacttctatatgcgcgaccgctaccagctcaatctttcccgccagcaaacccagctgtttaccgcctgggataagctgtatccggtaacaacctgggagtgcgaacgcgacgcgcgtattgccaaagttcagggcaaccataatccttacgtcctgcaggcttgccaggcgcaaaagagctaacctacactagcggcaattgttaatttgcagcttcactccttcccttgccatgggggaggagaatatctgcgcaaagaacggaatatcaagcatgcgcattcctcgcatccatcacccggaaccgattaccacgggtagccagatagccctttccgacgacgcggccaaccacgtcggtcgcgttttacgcatgggtaaaggccagacaattgagctttttgacggcagcaatcaggtcttcgaggcggtcattgtcgaggcaggtaagaaaaacgttctggttgacgttcagagcagcaaaatggataaccgtgaatccccgctgcatatccatttaggccaggtgatgtcccgcggcgaaaaaatggaattcaccatccagaaatcgatcgaacttggcgtaagcctcataacgccactgttttccgagcgctgtggcgttaaactggacgccgaacgtttgcagaagaagatccagcagtggcaaaaaatcgccattgccgcctgcgagcaaagcggccgcaacgtggtgccggagatccgccccgccatgcagcttgaagcctggtgcgcggagcaggacgagggtctgaagcttaatttgcaccctcgcgccaacgccagcattaatacgctgccgctgccggtcgaacgtatccggctgctgattggcccggaaggcgggctttcggcagaagagatagcgatgaccgctcgctaccggtttactgatatcctgttgggaccgcgcgttctgcgtacagagacaactgcgctcactgccattaccgccctgcaggtgcgttttggcgacttaggttgaagcgttaacggagaagaacaatgattaagctcggcatcgtgatggaccccatcgcaaccatcaacatcaagaaagacaccagcttcgccatgttgctggaggcgcagcgtcgcggctatgaactccattatatggagatgaacgatctgtacttaatcaacggcgaagcccgcgcccgtacgcgtaagctgagcgtcgagcagaactacgataaatggtacgcgttcaacggcgaacaggatctgcctctggcggaccttgacgtcattctgatgcgtaaagatccgccgttcgataccgagtttatctacgcgacctacatcctcgaacgcgccgaagagcaaggcacgctgatcgtcaataagccgcagagcctgcgcgactgtaacgaaaagctgtttaccgcctggttctccgagctgaccccggaaacgctggtcacccgtaataaagcccagctgaaagccttctgggaaaaacatggcgatgtcattctcaaaccgctggacggtatgggcggcacctccattttccgcgttaaagagggtgaccccaacctcggcgtgattaccgaaacgctaaccgagctgggcagccgctactgcatggcgcagaactatctgccggccattaaagatggcgataagcgagtgctggtggttgacggcgagccggttccttactgcctggcccgtatcccgcagggcggcgaaacccgcggtaaccttgcggccggtggtcgtggcgaagcgcgcccgctgaccgaaagcgactgggccatcgcccgccgcgtgggcccgacgctgaaggccaaaggcttaatcttcgtcggtctggatatcatcggcgatcgcctgacggagattaacgtcaccagccccacctgcgtacgtgaaatcgaagccgccttcccgatttccattaccgggatgctgatggatgccatcgagaagcgcctcaataaataaagcgcttattcaggctgcaggccagcgcctgtagcctggagcctgctcaggagattcacgctcaggttcataccggcaacgcgccttgagcctgcaagataaagtgaatcgacactcccttgctttacccgcatactgggtgctgcttttttgaaccaggaacagaacctctgacaatgaatttacagcatcactttctaattgccatgcctgctctccaggacccgatgttccgtcgctccgtagtctatatctgcgagtataacgatgacggtgccatgggcatcatcatcaataagccgatggaaaatctgcaggttgaagggatcctggagaagttaaaaatcacgcctgaaccgcgcaatcccgagattcgcctggataaaccggtgatggttggcggcccgctggccgaggatcggggttttatacttcattcgccgccttccgacttttcttccagcattcgtatttccgataacacggtgatcaccacctcccgcgacgtgctcgaaacgctgggtacggataaacagccggacaacgtgctggttgcgctgggctatgcctcctgggagaaaggccagctggagcaagagattctggataacgcctggctcaccgcgccggccgatcggaatattttgttcagcacgccgatagctgaccgctggcgcgatgctgcgaagctcattggcatcgatatcgtgacgatgccagccgaagcggggcatgcgtaatgagcggcacttttttaggctttgattttggcaccaaaagcattggcgtcgccgtagggcagcgcatcacaggcactgcccgcccccttcccgcgttgaaagcgcaggacggtaagcccgactggaatattatcgaaaagctgctgaaagagtggcagcccgaagccgtgattgtcggcctgccgctgaatatggacggcacggaacagcccctcaccgcgcgcgcgcgcaacttcgcgaataaaatacacggccgattcggcgtgcaaataaccctgcatgatgaacgtctgagcacggttgaagccagagccgggctattcgaacacggtggattccgggcgctcaataaaggcagcgtggattccgcttctgcagtcattattctggaaagctacttcgagcaaagtttctgaacatcaacgatggcgccctaccgcagcggcaggcgccatcatcctgatttcatttttagtggcgcaaatgctcattcgcccagctgaccgcctgagtccggttcttcacgcttagcttacggaacacgttgtacagatgggtacgcaccgtgttttcactgataaacagcgcgcgggcaatatccagattggtcgccccgcagcgaagttcattcaggatttcacattcacgctcggtcagcggtgaattttccgcaggcgccgatacatgatccgcagcatacatcgccgggtgcatcacgctcaattcagccgtctgttcgccgttcagcacagccttaacgccctcaattaagcgcgattcatcatcgtcatgacggaaaacgccgtacagcgctggccactgcgccatttcgtagagctcatacttttgcgcgctattgataatcaataaacgggggttatccgcctgtaaacgaataatgtcacgccatacgctattcaactttttatttgaaactgcaatatcaaataatattacagaatctttcaaaagacgctgcgcgaggggtttgttaatattttgcagaacgactgacgcagataacttctcagccagccaggttgcgaatgctttgctttgaatagaggggtgagtaataaaagtaacctggtgagaaaaagccgaattctcagataaattaatcacttaaaactctccttagttgattcccgccttcatagcggttaaatgaattaacaagaatacgatcgctggtgtatttataaaatcaaaccaaacttacaccttgaaacattattccatgggaattttcctatccctgtaaacagcataaatcgaatgccttaagagagtcaaaagattatcaaacttttttcctggttatgggaggtttatgtcaattcgtttttcatagcgtgcattattcggcttaattttaggtacttatttgtaatataaaataatgataccaaacattaataaaacattatcataacaagccattggtatgatgtctgaatataaaagatgcagctataaaagacccgcagccgtacgttgctgaaagctttgcgtaaaagtttgcatcccgaattgctgcccggtttgcatcacgccgggcagctgatgcgttttcccctcgcggatcaaattcgccaccgccggggtattaaccaaaagctcgtatagcgcaactcttccgccagcagtatccggaaacaatttttgtgccagcaccgcgcataaacttcccgccagctggctacgaacctgctctttctcctgagcgggaaaaacatccaccagcctttcaaccgcctgtgccgcaccgcgcgtatgcagcgtcgccataaccagatgtccggtctccgccgcggtcaatgccaggcggatcgtttcgctgtcacgcagttcccctagcagaatgacatccggatcctgacgcagcgcagcgcgcagggccgcggcaaatgaggggcagtggcgaccgatttcccgctgctggatcaggcagcgctcgctgtgatgaataaactcaaccggatcttccagcgtcaggatatggccattgaggcgctgattaagatagcccaccatcgccgccagggtggtggatttcccgctaccggtggcgcccgtgaccaggataagcccgctctcctcattgagcagctccgttaaggcggccggcgcgccgagatccgccagctgcgggcaggtttctgccagcagacgcagggccagcgacaggccgcggttgtggacaaatgcgctggcgcgcaggcgcgggccgccggccggagccagcgcgaaatcaacctgcccgcaggcctgccactgggcgagctgctcggcgttgagccaatcagcgagtatcttgccaatatccggagaggtaaaaggcgcaggctccagcttgccctggcgacgccagcgcggcgttgaagcattgcacaggtgtagatcggagacgttatgctttacactaagggccactatttcttccagttccataactcatcctcggtatatgaacgatattgcgcataacctggcacaggtccgggacaaaatctcagccgctgccgcacgctgcggccgtgctccagaagaagttacgctgcttgcagtcagtaaaacgaaacctgcgagcgctatcgaagaagcgatggccgcaggccaggtcgcgtttggcgaaaactatgttcaggaaggggtggagaaaatccgctactttcaagagaccggggcaagcgggctacagtggcactttatcgggccgctgcagtccaataaaagccgcctggtggccgagcattttgactggtgccataccgtcgatcgactcaaaatcgccgctcgcctcagtgaacagcgccctgctcacatgccgccactcaacgtgctgattcaaatcaacattagcgatgagcagagcaagtcgggcattcccgttgacgagctggacgcgctggcggcagagatcgcgaaactgccgaatctgcagctgcgcggtttaatggccattcccgcgccagagtcagaatatgtaaggcagtttgccgtcgcccaacaaatggcggtagcatttgcgcggctaaaaacgcactaccctaccgtcgatacgttgtcgctgggaatgtcggatgatatggaagccgccatcgcggcgggaagcactatggtgcgcatcggaaccgcaattttcggcgcgcgcgactacagcaaaaaataaggaatctgaggaacgccatgaagacgttgactttcctgctctcaacggtcattgagctttacacaatggtcgtgttgttacgcgtctggatgcagtgggcgcgctgcgacttttataacccgttttcgcagttcgtggtcaaggctacgcagcctgtcgttgggccgctgcgccgcattatcccggcgatggggccgctcgacagcgcctccctgctggtcgcctttattctctgcgtcgtgaaagctatcgtgctgtttatggtcgtcaccttccagccgattatctggatctccgcgctgctgatcctcattaaaaccgtcggctcgctgattttctgggttctcctgctcatggcaatcatgagctgggtaagccagggacgcagcccggtggaatatgtcctgatgcagttggccgatccgctgctgcgtccgatccgcagactgctgccatcgatgggcggcattgatttctcgccgatggtgctggttctgctgctgtacgtgatcaacatgggtatcgccgaactgttgcaggctaccggcaacgttctgcttccggggctgtggatggcgctatgagtgccgtcgaagcctgcgctgatgggttggtcttacggctgtatattcagcctaaggccagccgcgacagcatcgttggtttacatggcgacgagcttaaagtcgccattaccgcgcctcccgttgacggccaggccaacgcccatctggtaaaattcctcgccaaacagtttcgcgtagcgaaaagccaggtgcttattgagaaaggcgaactgggccgccacaaacagataaaaatcattcatccgcagcagatccccgatggggtcgccgccctgaaagaataaacaggatctcatatgcaaaaagttgttctcgccaccggcaatcccgggaaagtgcgcgagctggcctcgctgctggcagattttggcctcgatatcgtggcgcaaaccgaactgggcgtggattccgcagaggaaaccggcctgacctttatcgaaaacgccattctgaaagcgcgtcatgccgcgcagattaccggcctcccggccatcgccgatgactcaggtctggccgtcgatgcgttaggcggcgcgcccggcatctattccgcccgctattccggcgaagacgcgaccgaccagcgcaatctcgaaaagctgctcgatgcgctgcgcgatgtgcctgacgatcggcgccaggcgcaattccactgcgtgctggtctatctgcgccatgcggaagatcccaccccgctggtttgccacggcagctggccgggcatcatcgctcgtgaagccgcaggcagcggcggctttggttacgacccgatattctttgttccgacggaaggtaaaaccgcagcggagctgagccgtgaagaaaagagcgccatttcccaccgcggacgcgcgctcaaactgttactggaagccttacgtaatggctaatttgccgcccctgagcctctatattcacatcccgtggtgcgtgcaaaaatgcccgtactgcgatttcaactcgcatgcgttgaagggcgaggtaccgcacgacgactacgttcagcatctgctgaacgatctgcgggccgacgcccactatgcgcagggacgtgaaatcgggactattttcatcggcggcggtacgccgagcctgctctcaggcccggcgatgcaaaccctgctcgacggcgtgcgggaagctcttcccctggcggacaacgcggaaatcacgatggaagccaaccccggcaccgtagaagcggatcgttttgtcgagtatcagcgcgcaggtattaatcgcatctccatcggcgtacagagctttagcgaacaaaagctccagcgtctcgggcgcatccacgggccgcaggaagccaaacgcgcggcaaacctggcaagcggtctgggactgcgcagctttaacctcgatttaatgcacggtctgccggatcagtctctggaagaggcgctggacgacctgcgtcaggcgattgcgctcaatccgccgcatctctcctggtaccagttgaccattgagccaaacaccctgtttggctcgcgtccgccgaccctgccggacgacgacgcgctgtgggatatttatgagcaggggcacagcctgctcagcgcggcgggctatcaacaatatgaaacctccgcctacgctaagccggggtatcagtgccagcataacctgaactactggcgctttggcgactacctgggcattggctgcggcgcgcacggcaaagtgaccttcccggacgggcgcattctgcggacggcgaaaacccgccacccgcgcggctatatggaaggccgttatctggagcgccagcatgatgtggaagatgcggataagccgttcgagttctttatgaaccgtttccgcctgctggaagcggcgccgcgagatgaattcagccgctacaccgggcttgatgagcgtacaatccgtccgcaaatcgatgccgccattgctgagggctatctgacggaagatgagcgctgctggcagattaccgagcacggtaagctctttttgaactcccttctcgaattattcctcagcgaataaacctcgctatgcttatcccgttataacaataacgggataattaattattcgcttttcccgaaatatcaatatcgctatttccgaatcatctcaattcaacatttccaataaaaataaattcacattcatttattaaaaataaatataacctaccgcacaaaaatacgtatttgatcgcctgattgcgaaaaagtgtgagtcagacagcttaaagatgtacgacaacaaggataatatgtcatacagaaacaaggaataccctttaagatattgaccaattaccctaagtgcatggagccgactcatgaaaaaactctctttttctcgttctctggcgtgtgtatctctgcttgccctgctcgcttccggcgccagcgcagctgaaaaagtcacgttaaaactggcacataacctcgaacgtagccacgttgtccatcaggcctttgaggcgatgtccaaagaggttaaccaactttccaacggtgatatgaagattcgtatatatcccagtagccagatgggcagcgcgcgcgaaacgatggagctattacaaaacggcgcgctggatatgaccaaaggttccgccagcgatctggaatcattcgataacgtctacgcgatatataatttaccgttcctgtttaaagatcagaatcacttcaataaagtcgtctttggtgacgtgggcaaggaaattatggagtccacgaaagataaaggattctttgcgctttccgcctatgttgccgggacccgcagtttttacaccaaaatgcccatcactaaaccggaagatttaaaaggattgaagatccgcgtccaggccagcccgacaaccttaaaaatggtcgaattaatgggcggttcgccaacccctatttcctttggtgaagtttataccgccatgcagcagggcgtggtggacggcgcggagaacaacgtgccttcctgggtgcaaacgcgccatatcgaaatcgcgaaagtgttctcagaagatgaacatgcctccatcccggatttcctcgttatctccagtaaaacctgggacaaactgacgccggatcagcagcaaatcctgatcaaggcggcgaaagcttccgaagcgtatcagcaaaaactgtgggacaagatcgacgccgacacccgcgcgcaggccaaagccatgggcggcgaaattatcaaagtggataaagcgccgttccgcgccgccgtgcagccgctgtttgatgagttcaaaaaagatccgaagcaggccgccctgctggccaaatttgaagctgccgccgaataacacttagcgggccagccgctggcccgctttcatcgggaaaacaatgatgatacttaaccgcataaagctggcggtggaccgcacgatcgccgcattctccgtcgccgttatgattgcgctggttgtttgcgtcgtctggcaggtgttcagccgctacgtactcaaccagcccagcaccctgaccgacgagctggcgcgctttttgatgatctgggtcgggctactgggtgcggcatataccgtcggcgcccagcgtcatctggctatcgacttactggcgatgacactccctccccgcaggcaggcgctgctcagcgtcatcattaatctgctgatctttatttttgccggatcggtgattgtgaccggcggcgtgaagctgattgaaaaaacgctgtcgacctcccaggtctcagcggcaatgcagatccccatgggctacgtctatctgatcctgccgttaaccggcctcattatgatgttttacgcagtatgttttgtcagcaacgggctaaaaaacatgaagcacgctgaagcgggggcaaattgatggacagctatatcgcactgatgctatttggctctttctttattctggtttttattggcgtacctatctccttctccatcggcatcgccaccgtcggttcaatgctgctgatgttcccgtgggatatcgcggtgattaccgtttctcagcgcctcgcgaacggcctcgataacttcgccctgctggcgattccattctttatctttgccggtacgctgatgaacagcggcgggattgccatacgcttaatcaatctggctcaggtgatggtcggacgcgtaccgggctctctgggccacgtcaacgtgctggcaaacatgatgttcggctcgatttcaggctcggcggtcgccgccgccgccgcggtagggggcacgctgaaccccattcagacgcagaaaggctacgatccggctttctccacggcggtgaacgtctcgtcgtgcatcacgggcctgcttattccgccgtcaaacgtgctgatcgtcttttccctgacggcgggcggcgtgtcggtcgcgtcgctgtttatggccggctatctgccgggcattctgatgggcctggctattatggtggtctgtgccgtcattgctaaacgtcgcggctatccggtttctgaacgccccacctgcgcccaggcggcaaaagcgtttttcgacgccctgcccagcctgctgctggtgattattgtgatgggcgggatcctcggcggcatttttaccgctaccgaagcgtcggctatcgccgtggtctacacctttatcctgtcggtgctcatttatcgggaagtgaaatggcgcgatctgccgaagctgatccttgaatcggtggtgatgacctctatcgtgctgctgctgatcggcttttccgtcggcatgtcgtgggcgatgaccaacgccgacattccctacatgataagcgatgcgctaatgggggtgtcagaaaacccggtggtgatactgctgctgattaatatcgtgctgttaatcgttgggatctttatggacatgaccccggcggtgctgattttcacgccgatattcctgcccatcgcgcaggatttagggatggacccggtgcatttcggcatcatgatggtcgccaacctgtgcatcggtctgctgacgccgccggtaggcagcgcgctgttcgttggctgctccatttccggcgttaaaattcagcagctcatcaaaccgctgctgccgttctacgccgccctgctgatcgcgctgatgatgattgtctatatcccgcagatctcgctgtttattccgcagctgctggggctgatgtgatcgactgaccataatcgctacctgcgggcgcaggtagcgaaataaaacttactttaacgaccccaccagcgctttgcggctctcttcgagggagaccacgcggctgcagacatccttaccaaactgctggaaatcggcttcctggtttttccattcatcctgaatggccgtttgcaggccgccaaggctgccgaggatcccctgcagcgggttaccgccgcctttaagaaccgccttcgcccccatctcgttgatgctatcctgcagaatgccgcccatcgcctgatttaccagctgctggccgtcggcgcgcacctgatcgatggctttatagtggaaggtcaggccatcgttacgatgttcaattatgcggctcatttgcgctttcaactgcgcatcaagcttggtcaggcggctatgcatgctgctgctggcccctacctgttcggtaataattttatccagcgcggcgcggcctttttctacccgcgtgcgggcgccttcatcaatccacggcaggctgctgcgcaggccagcctgatagtcctgagcctgctcgcgctgagcggcgttcagggaatacgctttaccgttaaaggtcaggttgccgtccggcttaatcaccagatcgccgttttcgccttttacctgcacctgctgcgggctgaggatgacatcgtcacgcggcgtgacgctacactggtagtccgcatgcgcggacaaagcggtgacggaaagcgccaatgccaacagcgttttgcgcatcatttaactcccttcagacaaaacgggccggcagttgccgacccttgtcaaacttagtcccaccagatatcaaaaagttcgctggtgcgtacatcggcaagcccgcggtcttccagccatttacgtacgatggcctggtgttcctcggtgcatttgccgatttcctgcaggcagatcaggccttcccaggaaagataaccgctgccgtcaaaggccagcttattaggctcaatcacctcatcaatcagatcgttaacggtctggtcgatctgctcttcgctggttccatccgcgaaacgccacgcgacggaaaaacccacttcctgaaactcgtcgatatgcatttttttacgcagacgacggctacgattcgttgccattatttcaccctctcgaacattaagtcccatacgccgtggccaagacgatggccacgctgttcaaatttggttaccgggcgcgattccgggcgcggcacatagtcgttgctttcagaccggttacgatacccttcaagcgaggacatcacttccagcatatgctcggcatattgctcccagtcggtcgccatatggaagacgccgcccagcttcagtttacttttcaccagttcggcaaaaggcggctgaacgatacggcgcttattatgacgcgctttgtgccacgggtcagggaaaaacagctgcaccatgctcagggagttatccggaatcatcgtatgcagcacttccaccgcatcgtggcacatgacgcgcaggttctgcacgccctcttcttcggcggacgccaggcaggcgccgacgcccggcgagtgcacttcaatgccgaggaaattctgctgcggcttctctttcgccatcgccaccagcgaagcgcccataccgaaaccgatctccagcgtgaccggcgcctcacggccaaacagcgcggcgaaatcgagcggcgcatcgttaaattcaacgcccatcaccggccaaatattgtccagcgcgtgctgctgacctttggtcaggcggccctgacgacggacgaagctgcgaatacggcgcagcggacggccgttttcatcgaattccggagatatgacgtcgtttttcataaaagttaagtctgcttgtgagagtgttcggaaaacgggcattatccaaagttacccggcggatgcaagggtttacagcctctcgcccttgtgctgcaatctgccaccttataatcgctatcccggagccgtagctttgacttttcccgccgcgcaattttcagcccaggtgctggactggtacgacaaatacgggcgtaaaaccctgccctggcaaatcggcaagacgccctacaaagtatggctctccgaggtgatgttgcaacaaacacaagtggcgacggtcatcccctattttgaacgctttatggcgcgtttcccaacgattaccgacctggcgaacgcgcccctcgatgaagtcctgcatctgtggaccggcctgggctattacgcccgcgcgcgcaatttacataaagcggcgcagcaggtggacaccctgcacgacggcaaattcccacagaccttcgatgaagtcgccgcgctgccgggcgtgggtcgctctaccgccggcgcgattttatccctttctctcggtcagcattatccgattctcgacggtaacgtgaagcgcgtgctcgcgcgctgctatgctgtcagcggttggccggggaaaaaagaggttgagaaacgcctgtgggagatcgccgaggacgtcacgccggccaaaggcgtcgagcgttttaaccaggccatgatggacctcggggcgatggtgtgtacccgctctaagccaaaatgcgagctctgtccgctgaataacggctgcgtggcttacgcaaatcattcatgggctcaatacccaggcaaaaaaccgaaacagacgatccccgagcgtaccggctatttcctgctgatgcagcacggcgacgaggtgttcctctcccagcgtccgccggtgggcttatggggcggtttgttctgcttcccgcagtttgaggatgaagatgccctgcgggcgtggctggcccagcgtcagattaagaccgataatctgacgcaattaaccgcgttccgccacactttcagccatttccatctggatattgtgccgatgtggcttacagtgcactcatccggcgcatgcatggatgaagggggcgcactctggtataacttagcgcagccgccgtccgtcggtctggcggctcccgtggagcgcttgttgcaacagttaaaagccggagcaccggtttagctttctggcgattaaagaggattaagaatgagcagaacgattttttgtactttcctgcagcgtgaagccgagggccaggattttcagctgtacccgggcgagctgggcaaacgcatctataacgaaatctccaaagaagcctgggcccagtggcagcataagcagacgatgctgatcaacgagaaaaaactcagcatgatgaacccggagcatcgcaaactgctggagcaggagatggttcagttcctgtttgaaggtaaagacgtgcacatcgaaggctacacgccgccagaaaaacagtaagggcctgacggccctttacaacaataaacacaacacgcactcccggaatgatgaaaaaatacttagcgctagcgctgattgcgcctttgctcgtttcgtgttccagctcaaccaaaaaaggcgccgagtacaacgaggcgtgggtaaaggacaccaacggctttgacattctgatgggccagttcgcccataacatcgagaatatttggggttataacgaagttctgctcgccgggccgaaggactacgtcaaatacaccgaccagtatcagacccgcagccatatcaactttgatgcggggacgattaccgtcgaaaccatcgccggcaccgacccggccgggcgcctgcgccaggcgattattaaaaccctgctgatgggcgacgacccgaactccatcgacctctattccgacgtcgatgatattcagatttcaaaagagccgttcctgtacggtcaggtggtggataacaccggcgagtcgattcgctgggagtggcgcgcctcgcgcttcgccgactatctgctgcaaacgcgcctgaaaagccgcagcaacggtccgcgcatgatctacagcatcaccatcaacctggtgccgaaccatctcgacaaacgcgcgcataaatacattggcatggtccgtcaggcgtcgcgcaaatatggcgttgatgagtcgctgatcctggcgattatgcaaaccgaatcttcctttaacccctatgcggtcagccacgccgacgcgctggggctgatgcaggtggtgcagcacagcgccgggaaggacgtattccgttcgcagggtaaatcaggcctgccgagccgcagctatctgttcgatccggtcaataacatcgacaccggcaccgcctatctggcgatgttgaacaacgtctatttgtccggcatcaccaacccgacctcgcgtcgctatgcggtcatcaccgcctataacggcggcgcgggcagcgtgctgcgggtcttctccagcgataaggttcaggcggcgaatatcatcaacaacatgacgccgggagatgtttatcagaccatcaccagccgtcacccctccgccgagtcgcgtcgttatctgtataaggttaactctgcgcagaaaggctaccgccgcaggtaatctccctccagcgcccttgtttcctcaagggcgtattccttctgctatacacaatagagttgcgcaactgttttgcgattttctgcggcagttaacaaaagcatccatcgcataaatgatagaatccaaccaaaataacgccataaatgttatttaaaacacaaaacaattctatatccgtgaggatcaaaacatgaatcttaagctgcagctcaaagtactgtcgttcctgcagttctgcctctggggaagctggctgaccacgctcggctcgtatatgttcgtcaccctcaagttcgacggtgcggccatcggagcggtctatagctcactcggtatcgccgcggtgtttatgccgacgctgctcggtatcgttgccgataaatggatcagcgccaagtgggtttatgccatttgccatctggtcggcgcgctgacgctgtggctcgccgcccaggtcaccacgccgggggaaatgttcctcgtcatcctgctcaactcgctggcctatatgccaacgctggggctgattaacaccatttcgtactaccgcctacagtctgcggatatggatatcgtgaccgatttcccgccgattcgtatctggggcaccattggttttatcctcgccatgtggggcgtcagcttctccggctttgaactgagccatatgcagctctatatcggcgcggcgctctccttgctgctggtgctcttcaccctgacgctgccgcatattccggtggccaatcagcagaaaaaccagagctggaccgccatgctgggccttgatgccttcgcgctgtttaaaaacaaacgtatggcgatcttctttattttctcgatgatgctgggcgccgaactgcaaatcaccaatatgttcggcaacaccttcctgcacagctttgataaagatccgctgttcgccagcagctttatcgtgcagcacgcctcggtgatgatgtcgatttcgcagatctcggaaaccctgttcatcctgaccatcccgttcttcctcagccgctacggcatcaaaaacgtgatgctgattagtatcgtggcgtggatgcttcgcttcggcctgttcgcttacggcgacccgaccccgttcggcaccgtgctactggtgctgtcgatgatcgtttatggctgcgccttcgacttcttcaacatctcgggttcggtgtttgtggaaaaagaggttcgcccggaaatccgcgccagcgcgcaggggatgttcctgatgatgaccaacggcttcggctgcatacttggcgggatggtaagcggtaaagtggtggagcactttaccgtcgaagggatcaccgactggcaaaccgtatggctgattttcgccggctattcgctggttctggcttttgcctttgtggcgctgtttaagtacaagcacgtccgcgtaccagccggggcgcagaccgtcgcacattaaataaacggcttaccccagatttacgagtaaaaaaacgcgccccggtgttatcagcgggcgcgtttttatgctttcagcacatagccatatagccgcttaatgccgtcagggtccgtttcgctgtagaccccctggagctccggcgagaagcccggcagcatattgacgccttcctccagcgccagaaaatagcgcagcaccgccccgccccagatttcgccaggcacgacgcacagcacgcccggtggatacggcagcgcgccctccgccgcaatgcgcccttcggcttcgcttaagcgcaccagctcaacgttaccgcgaataaactcgcggttggcgtcctgcgggttcatcaccgcgcgcgggaagctcctcttgcggaacatctctttttgcaaatccttcacgtcaaagctgacgtacaggttatgcatctcctggcacagctcgcggatggtgtaatcccgatagcgcaccggatatttattaaaaatggtcggcagaacatcggccagcggggtgtcggattcaatatgctgctcaaactgggcgagcatcgccaccagctgcgccagcttctcggcgctctctgcgggcgtcagcaggaacagaatggagttcagatcgcacttctccggcacgatgccgttttcgcgcaggtagtgtgccagaatggtcgccgggataccaaaatcggtatattttccgctctccgcatcgatccccggcgtcgtcagcagcaatttacaggggtcaacgaaatactgatcgctggcatagccttcgaagccgtgccagcgcgcgcccggctcaaagctaaagaagcgccgttcgcgggcgatggcttcagtgggatgatcctgccacggacgccccgccaccaccggtggaataaacggctggatcattttgcagttggcgataatcgccttgcgcgcttcaatacccagcgccacgcactccgcccacaggcggcgtccgctctctccttcgtgaattttggcattcacgtccagagcggcgaacagcggataaaacgggctggtcgaggcgtgcagcataaaggcgttgttgagccgcttatgcgggcaaaaacgttcctgtccgcgcaggtggttatcttttttatggatctgcgacgtttgcgaaaaaccggcctgctgtttgtgcaccgactgagtgacaaaaatgcccgggtcgtccggcgtcaggtccagcagcagcggcgaacagtcggccatcatcgggataaactgctcgtagccgacccaggccgagtcaaacaggatgtagtcgcacagaccgccgattttatcgaccacctggcgggcgttgtacaccgtcccatcataagtaccgagctgaatcaccgccaggcggaacgggcgcggcgcatcggctttttccggcgccgtctcgcgtatcagttcgcgcaggtatttctcatcgaagcagcgatcgtcgataccgccaataaaaccaaacggattgcgcgacgcttcgagataaaccggcgttgccccggcctgaatcagcgcgccatgatgattggatttatggttgttacggtcaaacagcaccagatcgccgcgcgtcagcagcgcgttggtcactactttgttcgccgcagaggtgccgttaaggacgaagtaggttttatcggcgttgaagaccttcgcagcgaacttctgcgcgtgtttggcagacccttcatgaatcagcagatcgccaagcttaacgtcggcattgcacatgtcggcgcgaaagacgttttcaccaaagaagtcgaaaaactgccgtcccgccggatgcttcttaaagaaggcgccgtgctgatggcccgggcacgcgaaggtgctgttatccatctcaacgtattgggtcagcgtatcgaagaacggcggcagcagattctcttcatagccgcaggcggcggcttccagttcgagccactcctgctctttgccgctaacgatggccgtcacgccttctggtttttcgtggtcagcgtcactgaacagataaaccggcaggttgaacccggtgcgtttcagtaacgcaaggatgccgctgcggctgtccgctacggtaatgacgactgccgccacatcggtaaaatctgtactgtccagggccacaacgcgacggtgggtggacaggcgggataccagctcgcggctggcggcaatgtgcattgatttcatgagcgcgaatacccgtttccggagagtaaaaggcttcggccagggcgtctgggctctggccaacgaaatgtcagggtctgactggatcccagctccgaccgccagacatcagtaaaagcagaccgcgtccgatcttactgttgtcctgcagtgagcctgcgttacgctcaccgcatggtgggcagaagttgcagtgtaagggtagcaagacgaggctgcctgcgcatctgtacgcagcggcaacggcgatgtagcggcgatgtcgtcatcacggcggcctcattcaggagaggagaaaattcgcgcaatcatgtcacctttaaatctaccgcgcaagatgaattacgtatgcagccataccacggatgcgcaagccttttggcccgtttagcgtcataataatgcagtcattagggataattaacaggagtcatgctgtggttacagggccatttattaacgccggcgcggtccttttgggcggcgtactcggcgcactcttaagtcaaagattgccggaacggattcgtacatcaatgacctctatttttggcctcgcgtcgctgggcatcggcattctgctggtgatcaaatgcgccaacctgccggtgatggtgctttcaacgctggtgggcgcgctgctcggcgaagtgtgcaacatggagaaaggcattaatacgctggtcagtaagctccagcagctgctttcgcccaaaaaggggcagaaaaaggtctcagcgcatgagtcctatattcaaagctacgtcgcgataatcgtgctgttctgcgccagcggaaccgggattttcggcgcgatgcgcgaaggaatgaccggcgacgccagcattctcattgccaaagcgtttctcgacttctttaccgccaccatcttcgcctgcaccctggggctggccgtctcggccatttgcgtaccgatgctggccatccagctggcgctggcggcctgcgcgtcgctgattatgccgttaaccacgccgatgatgatggcggatttcaccgccgtcggcggcatgctgctggtcgcgaccggtctgcgcatctgcggaattaaaatgttcgccgtggtgaatatgctgccggccctggtgctggcgatgccgatttcagtggcctggacggcgtttttcgcctgaagatgcgtgcttttgacgcaatgtggtgatagattgttcagtctgctgcgaaacagataaatttcgttgacgaggtgcggtgaatcaggtttaatgcgccccgttgcccggatagctcagtcggtagagcaggggattgaaaatccccgtgtccttggttcgattccgagtccgggcaccacttattcagagaacccagcctatggctgggtttttgcttttctgcgaccggactctccatcgaactccgttcgattattcgccgcacggcagtcttattttgcaagatattgggtggaaactcgcttatcagaagttatacccaaaacaacatgctaaatccggtcaaaacgacgatacaggcgacattcaaaaacaggccggcgcgcatcatctcctgctgcttgatatggccggtggcgaaaacgatagcgtttggcggcgtcgccacgggcagcataaaagcgcatgaagccgcaatggcaatcaataccgacagaatcacaggcgacatgccgaacgcttcggccactgaggcaaatacgggaataagcaaagcggcgctggccgtattactggcaaactcggtcagaaacaccacgaatgttgcaatcaccaggataataataaatatccccatatgagccaccatcccgctaatctggtttgccaggaacaagctggtacccgtctctttcaacacattacttaagcagataccaccgccgaataataacagcacgccccagtcagccgttttttctatatccttccagtgaaccacccgggcgaaattgactaatataatggcgcctaaagccacaatggtatcgaaggatttaaaaccgcccagtaggtcgttaatggggccgctgaaaatccagaagaatacggtaagcgcaaaaatagccagggtgacaactttgcctttatcccaatcgacctgctcagtattcgtttcgaaggtccccttaagttccggcctgaacacgaggtaaagaatcgcaatagcgactggcagtaagacgatcattgccgggaaaccgaacttcatccagtcaaagaaggagagccccacctcggcggcggcaatcgcattcggtggactgccgacgatggtcgccattccgccaatgctggcgctataggcaataccgaggagcacaaacacataggtcgaatggcggtttttgccatcgactttactcaggatccccaataccagcggcatcatcattgcggccgtcgccgtattactgatccacattgacagcagcgccgtcacgccaaatagcataaagaccgcgaggcgcattttgcccctcgccatcgctaataccttatcggcaatgactttatccagcccctgcacatgcattgccgccgccagagcaaagccgccgaggaaaaggaatatcgttgagttggcgaaactgtttagcgccgcctgggtattaaatacccccagaagcacggccatgacgggaaccatgattgccgtaacggtcacgtgcagcgcttccgttaaccataatacggcgataaaagcgagcatactcagccccattaccaccttcggctcatagggtagcgtgttgtagagaacgataaacaaaacaatatcgagcaaaatgatgatgctgttacgattaaaaaaccactcatgggtattggtgggtaaaggactcatgtcgtttttattcatagtagcttccttgtaactggttacgactgaatcattacatgtatatgtccttcaggtataaattatgttcctgttctgttaactggatcgtaccagacaatttccttgctgaatgacacccaggtcaggatatttccggaaagaggttcctgatagagacgatttattgaagcgagcaggccgactttattagctttaatttccttcatctgaatttctgtctttggctgctacgccggtatacgcggcgttgatagtttcaccaacacctaaaatagccccaaagaaccatcgattattttcggcaatccatttctgaaatagagataaagcagcgcgtaaaaacggataattcggtgaaaaaccgggcaaaagcgcgctattctggaaatcaacacgcccaggcggctaacaacctttccctccggacggctaaaaagcatcttatattcctttttgctcttagcggcagacaaaagttctttaaaatgccaattttgcagccctaccattcaaatcatctcgatacgaatgggcaaaatgttatgtcagtttttcattccgttagcgacctgattggtcatactcccctgctgcagcttcataagctggataccggcccctgcagcctgtttctaaaactggaaaatcaaaatcccggcggctcgataaaagaccgcgtcgcgctatccatgattacgcaggcagagcgcgaagggaaattaaaacccggcggcacgattatcgaagccaccgccggcaataccggcctcggtctggcgctgatcgccgcgcagaaaaattatcgcctgattctggtggtgccggacaaaatgagccgcgagaagattttccatctgcgcgcgctgggagcgcaggtgcagcttacccgctcggacgttaacaaaggccatcccgcctactatcaggactacgcccggcgccttgccgacaaaacgccaggcgccttttatatcgaccagtttaataacgaggctaacccgctggcgcatgccaccaccactgccccggaaatcttccagcagctggatggcgatattgacgcgatcgtcgtcggcgtcggctccggcggaacgctcggcgggctacaggcctggtttgcagagcactcccctgaaacggaatttatcctcgccgatccggcgggctccattctggcggaccaggtcgaaaccgggcgctacggcgaaaccggctcctggctggtggaagggatcggcgaagactttattccgccgctggcccatcttgaaggcgtccgcagcgcataccgcgtcaccgatagcgaagctttcgccaccgcccgccagctgctgcaggttgaaggcattctggcaggctcctctaccggaacgctgctcaccgccgccctgcgctactgccgggcgcagacatcccctaaacgcgtggtgaccttcgcctgcgacagcggcaataaatatctatcaaagatgtttaacgatgactggatgcgccagcagggctttttaagccgtccatcgcgcggcgacctcagcgattttatcgctctgcgccatgacgaaggggcaaccgtcaccgccgcgccggacgataccctggcggccatcctcgcgcgtatgcgcctctacgacatctcgcagctgccggtgctggaaaacggccgcgtcgtcggcatcgtcgacgaatgggatctaattagccacgtccagggcgacagtcagcgcttttctctgccggtcagggaagcgatgacccgtaacgtggagaccctggataagcacgcgccggaaagcgcgctgaaggccattttcgatcgcggcctggtggccgttatcgccgacaacgatcgttttcttggcctcattacccgcagcgatgtgctgaccacctggcgtaaccgactcgaacagtaaggacttctcaatgacaaatttgcataccctgagcgtacatagcggcacatttaccgatgaacacggcgcggtgatgccgcctatttatgccacctccacctttgctcagcccgcgccgggccagcataccgggtacgaatattcgcgcagcggcaacccgacccgtcacgcgctggagacggcgattgtcgacctggaaagcggcacgcgcggctacgcctttgcttccggccttgcggctatctcaaccgtgctggagctgctggataaagacagccacctggtcgccgtcgacgacgtctacggcggcacataccggctgattgaaaacgttcgccgccgcagcgccggcctgcgggtgagctgggtgaagcccgacgatctggcggccatcgaagcggccatccgacccgacacgcgcatgatctgggttgaaacgccgaccaacccgctgcttaagctggccgacctcagcgccatcgccgccattgcgcggcggcacaatattatcagcgttaccgacaacaccttcgcctcgccggctatccatcgtccgctggagctgggctttgatatcgtggtgcattcggcgaccaaataccttaacggccactccgatgtggtcgccgggctggcggtggtcggcgacaacgccgcgctggcggaaaagctgggctacctgcaaaacgcggtcggcggcgtcctcgacccgttcagcagcttcctgacgctgcgcggtattcgtaccctggcgctgcgtatggagcgtcacagcagcaatgcgctgctgcttgccgagtggctggagcagcagccgcaggtcgaaagggtctggttcccgtggctggcctcgcatccgcatcatcagctggcgcgcaggcagatggcgcttcccggcggaatgatctccgtggtggtcaaaggcgacgatggctacgccgagcggattattcgtaagctgaagctgtttaccctcgcagagagcctcggcggcgtggaaagcctggtgagccagccgtttagcatgactcacgcgtcgatcccgctggagcagcgtttagccaacggcattactccgcagctgattcgtctgtcggtagggattgaggatccgcaggatctgatcgccgactggcgccacgcgctgcgcgactaagcagattacccggcggcggctaacgccttgccgggcgacaagatcccccatcacatcaggcccgccgcccggcagagaattaagcagtctgcccgttctggccctgcccctgcagaagatgctcaacaaagcgcgtcagcttcggcagcggccgcagatcctgccgccagagcaggtgaatcggcctcggctgcggggtatacgcctcgagcacgcgcaccagtttgccgcactcgagcgcatccgccagcagcacttccggctgcagcagcagcccggcgccggcgatcgccgccgttcgcagcgcatagccatcattacagcgcagaacagcgtcgcgcttccagcgtacgccctcctccgcgcccggcagcttccactcattgcgcgcggtccacaccgtatgcgacaaacagagatgatcggccaggtccgcaggcgttgtcggcgtaccgtggcgggctaaatacccgggcgcggcgcagatcgtcatccggtagggcgcgagatattttgccaccagatcgttattgcggatctcgccgatgcggatcgccagatcgatgccctcatccaccagatcgaccatccggttggtcagatccagctccacgcgcacgtcgggccaggcctgcagaaacgtggcggtcagcggggcaatcacgcaggcgccaaacgacgtcggcgcgcttatccgcagcgtgcccgcgggcgcgacccgtagtctctccactgaactttcggcgatggagacctgctccaggacgcgtttcgcctcgtcaaaatagacccgcccggcgtcggtcaggctctggcgacgggtattgcgctcaagaagacgggtattaagctgccgctcgatcagcgcgatatatttcccgaccatcaccgccgacatctcgagccgcgctgcggcaccggtaaagcttccgcactccacgaccgcaataaaggtctccatcgcccgcagcttatccatattacaaacccctggttagtaattatttaacttttagccagtttatccgatatttgttttattaaagaatagcctctcacccgagagaggaacctgctatgaaaatcatcattattggcgccagcggtaccgttggccgagcggttgcgcaagaattaaaccagcgtcatgaagtcattcgcgtcggccgcactcagggcgactatcaggtcgatatcacctcacagcagagcgtgcagaacctgtttgcgaaaaccggtcgggtagacgcgattgtttccgccaccggcaatctcttctttggcccgctggcgaccatgaccgacagcgatttcaaccagggcttacaggataaactactggggcagattcgcctggcgctgaccggccagcattatctgaacgacggcggatctattacgctgattagcgggatcgtcgcccatgagcccatcgctcagggcgtcaatgccaccaccgtcaacgccgggctggaaggattcgttcgcgccgccgcctgcgaactgccgcgcggaatacgtattaacctgattagccccaccgtattaacggaatcggcggcagcctacgacggtttcttccccggttttaccagcgtccccgccgccagcgtggctcaggcctaccgccgcagcgtagaaggcgttcagagcggacggatctataaggtcggctactgaccggcgccgctgcgggccggaatgacgctgccggcccgcgacggcgtttacatcctgtttcatcaacggctacacttatccttcaatttgcctttttgaatgactcatgttgaagaaactcgcttttattgccccgcttttggcgcttatcgctctacttatctggtggttcatgccccgctacgccgaagaggacgtcgcgtactaccgctccgtcttctgcgttattgaccatcaggacagccgtgcgtttctccgcgatatggaaaatatgattgaaggcggtaattcggattatgcgctgcataagacccactacgtgcccgctctgggccaacggatgctggacacctggcagcagttgacgccggaagagcagaaaagtatcagccaggaccagcagcgctgtcgccagctgatgagcgaaaagcagcgcccggattaaggcatattactgcgcaaaatgactcgctgacaataatagaaaataacattctgctgcgacgagcggaatgttaaacataaacatggcgaatgaataacagtatttagcgcgcgaaaaagttatatttaaccgatatcctgacgttattatcaccctatttatttaaaaaaatcgttctggaaataattccgtcacaatcccctcctatatttccaagccttaataaacagtaaattataaccaataattatcgaggcttattttgattcgctatattcccgtttcgctctctctggtcgccgtcggcgtttccggcgtgctctacgctgcgccgataaatacgcccgtactcgctacgatggataatttccgcgatatcgctggcacgacgtctgtttataccaccagccacgacggcaccctgcgcaccggcgttttttatcgttctaatgctctggcattatcctccgcggaccaggcaacgctgagcacgctcggtatcagcgatgtttatgatttgcgcacggccagcgaaatcgccagcagcccggacgtgatgcccgacggggcgaggtatacccatattgatatcatcggcaacaccgcttcgggcagcaacatcacctcaataacgttcagtagcgccgctgaagccaaagcgatgatgcagcagaccaacgtctccttcgtcagcgatgccgggatgcgcacccggttcaccacgctatttaacgatctggccagcgccgacggcgcagcgctgttccattgtaccgcgggcaaggaccgcaccggctggaccgccgcgatgctgctgagcattgccggcgtcgatgaggggaccattatggaaaactacctcgccaccaacgactatacccgccagcgcgtcgaagcgaccctggcgatgatgccccccgccatggcggcaatttacgagccgctgctgggcgtcgatgccagctatcttcaggccgggctggatgaaatcagccgcgagtacggatcggtggataactatctgaagcagggcctggggctgtcgcaggagacgctctacgtcctgcgcggcaaaatggtgcagtacggccagctgccgggacaaagcgaactgcgggggaatgcggcgcagggcgctgcgctgcttaacgctctgcaaaacagcgagctatcgggccgctacaccgactataactattatctgcaatcggccattgatgccggaaccctcggcggcgtggagactcaggtcggcgggcagatttacgcggacgccgccagctacctgctgcgcagcggatcgcgattagacagggcgttaacgccgaatattgatagccgtcagctgcgggatggggaaggaaaactgtggctgaccgggcttagcggctatcttggcaccgatggttccgcccgcgccgccagcagtaatgagcataccaccggctcgctgctgggctatacctggcggtttaacgcgcagcttagcggctacggcactctgggatatagctggggctcgctgggcagcgccagcgccgatgcggatgccaacaccactctgctggggtttggcggtcgctatgcttttgaggatttaaatcatggcctctttgccgccgccgatcttaacgcaggctggatcgattatagcagtacgcgccggctgaatggcgggctgggtacggccaccggcgatacccatggccagctggttggcggcacgctgcgcctcggctacgtcagtccgctcgattttgccagcgttgagtacgccgtcgggacccgcctgacccacctgcggatggacgctttccgcgaaaacggcagcgagctggcgctcaacgtcgaccgcgtcagtgaaaataacgccagcggtattgccaatgtgagtatcgcatttcattcgcaaaacggtggcggctggcgcttcacgccggcgataaatatcggctatgaacacagtttcagcggcccttcggtacgcactcagggacaggtttatcactatgaggtcgtacagaacgcggccttcgatagccgtgacatggtcaacgctggcgccagtttgagcatcacgcgcggtgcgctgagcctgaaccttggcggccaggctgacgtcgccagcggcggcgacagccacggctacagcggcagccttagcgtgggctacgctttttaaacatccatagcaggccgccgcgggcggcttgctcttagccacgaaattgcaaagcggttaaacatacaccgccgaggatcggcgcatttttcgccgccatgggcaaaacgaaacgctggcaggaaaggtaaaacagaaattatgtttcaatccgctactggcagcggcaatcatcaatctgatgcatgattgtccttaccataaaaagtagttgatctggtatcgacaagctcttattttgcttctcagtttttaaacgagatgaaactgatgcctactattacagccagtagtatgaaagaagcaaaagagttaatgaattgtgggaagtacaaagaaatcgttctcaatttcgatattgatgctgacgattttttcaccctcgcaacatcccagtcaggaacaaaagtcaccatcacagacagaaataatcgctcatcggtcaaagcagaaaaataataaaaacccctgaggctcttcttatgctgttagctattggtaccgtcgctgttgcttttctttccacgttgatgctgatctggcttgacgatcgcattaccgaccaggattaacgaccggggccggcgataagccgcaaaaccgcccgcctctgtgtttctctcgcccgtagccatcggctgcgggcgattcaaaaaccccgccaatcccgttttcacattacgcactgatgattttcacccgccgggcaggtcatgcattcgcataaaaacaggggcttaaagaagaaaacgagaagggagccccgcgccgccgacggcgcggagcagggcgattacagcgacttcgccaggcgctcgacggcggtcatcagaccctctgtcgacaccgtcgagtaggacaggcgcagcgtgcgggtatccgggttatcgttatagaacgcttctcctggtacgtagaccacgccattttccagcgttttcttcatccattccatggtatcgaacggataacggaagcgagcccacaggaacataccgcctttaggacggctgaacgccagatgctcgccaagctgcgattccagcgcgtcggccagcgccacgcacttcttgcggtaatcttcgcggatcagggcaatctggctttccaggcggttcatgctcaggtattccgcggtgatgacctgcgagagcatattagtgtgcagatccgccgcctgtttaacgatcaccgtctgctgcgccagccagtccggcatcacgatccagccaatacgcatccccggcgcgaggattttggagaaggtggaggtataaaccacctgatcttcacagcccagctcaaccgcatactgatacagcggacgccgaacttcatcagtgaagctgatttcaccgtacggatcgtcttcgataatgacgaagtcgtgctttttcgccagctcaaccaggcggcggcggcgcgcttcgctcagggttttcccgccggggttgccaaacgtcggcaccagataaacggctttcacacgcgtggtttccagcagatcggccagctgttccaccagcatgccgtcatcgtcggtatccacgctgagaatattggcctgcgccagctggaagacctgcagcgccgccagataggtcggacgctcaacgacaatcgcatcacccggatcgagcagggtgcgggcgacgatatccagcgactgctgcgaaccggaagtgatatagacatgacttgccgaacaggccacgccgcgcgcctgacacagttcgctaacggcctgacgcagcggcggataaccttcggtcaaaccgtactggaacgcatcgttaaagcgcccgttcatcacctgctgcaccgccaggttcaggccttcggtatcaaaaagctccggggccggaataccgccgcccagagagataacgccgggcagcttactgtgcttgaggagttcgcggacggcggagggcttaagttcacccgcgcgggcggcgagtcgccgatcgtgcatactattttccttttctgtcttgttgttgtgatgttttatctatttttaccgttcattcccccggtcgcactatgctcactggggctacgggttcgtatgttcggtagcccggacagatgcgcagcatcgcctccgggttattcttcagcatcctgcggccttcccccgggggcggcgcgatgcgccttgcccgggctacaaatgccgcaggtgacgagaaccgcagcccggataaggcgctcaccgccgcaatccggggccaaacttaacggctatctgtgtcttttagcacgattaacggctcaatatcgctctcttttttaaccaccagagaatcatctccgcgcaggcaggtcccgccgtagttaccgccgacggtgaaggtgcaaacctggatgtatttgccatccacttttggcaggcaccacagctgctggtagatatttttgcggtcgaaaaactggccgctggttttatccagcacttcgtcctgcgggcctatcaggtcgatattgttgccgcagcggcccgagataggcttaaccgcatagccgctttccgccagctgctcgttgaccacaaaatccgtatccagaagatagcgatgattggggaacagcgaccacagcaccggcaaaatcgccttgttgccggggatgaccgtccacagcggctcgaagactaatacttccgggcgcagcagaacgtctatcaggcgcacttcattattcgggtgtccggtacgtatcggcaccgccgcgtactcatcggcgctgacttcccgcacctgctcaatggcggtctcccatgcccaggttttccagacgcagttgaccagacgaccgtcggcatcaatcagctgcccggcggcatcccagcgcagctcatccaggccaaacagaattttgctctcgaagccggcctgggtcagcgaacgctggataaactgcgcgtggtagttctcctccagatccttatcctgcatgatgtgcacgaaaggacgcgcccggctgtgcttccacgctccggccagctcatccagcagattttccgccgggttgtgaccggtgccgtagtagccctgcttcagccactgctcgaggatcagcccgccttcggtatggcaggacgcggaatcggcgttgtactcatacaccttgagcccgcgctcatccatacagaaatccatgcggccggtaatcatatgatggcgacggcgctgccacgagaggcgcagacgcggccagagaattttcggaatatcgaacagcgccagcaggctgtcatccttcatcaccttgtcggtagcgtgcaggtacatcagatgcagctcattggtggctttgataagctcctgctcggcgctttcggtgatggtgaaatactggtaagggtctttattgatgacgtggccgttggcttccacgtaggctttttgcagtgaatctttctcgttgagccagttgccgcggtattggcctttattcggcagacgcgcgcctttgatggccatcgcctcacccggcagcaccggctgcggcaggctgtgctcgatatcggcggtttggatcatccagccgaggatttcggtatcggcaaaggtgtctttaatcgtgtagaggccgtttttcacttccagcgtcagctcgcgggtccactgctggccctgcggcagcggcgagtgaatgacgttctgttcggcgatcctgaccttattccctatcagttgcgtaatcaccgccacgtggcccgtgtgcttaaactcgccgcctttctgccagatcagcagtgagccggcgagaggcggacggcgggagccgttggcgaacgcctgcagcggcagaatattgtcgttgaccacctcgcggagaaaacgcagggagaagatttcgtaggccatgccgacgtcggtgaaaacaaaaccgtaggtgaggaacagaaagcggcgcgcgaactccacgcactgccatttgtgccccatatactcattaccgatatagctgcggaacgtggcgtcatccggataatcttgcggatttaagctactgtaattagaagaataaatcgccacgccgcccggtgcgtagcctaatagtgtaccaaacggggcgtcactgcttgtggaacctttgctcatttagcctgacctcaaattaatgcagcccgggcagttggcgaaacaaaactccctcttcttatcctgccgcaggcacttaccagacagaggtggaatgatgataccactcattcgattcgctaatcgtgcccttaaggaaaataagcctgcgcccccgggcaaaagtgatatcgttatttgagataaaaaaacaatcaggagtcgacaatgagcacaccatcgcatctgaccgcccaaccgctggtctgggggcatggcccccgcacctttgaggtgttcctcgaacccacctgtcctttctccgtgcgggcatttaataagcttgatgacctgctggatgaagttggcgcggataacgtgacgatcaaaattcgtctgcagtctcaaccgtggcatctgttttccggcgtcatcgtccgctgcgttctcgccgcgtccaccctgccgcacggccgcgagcaggcgcataaggtgcttaaagccgtcgccgaccaccgtgaagagtttgagtttaccgaccactgcagcgggccgaacatgaacgccacgccgcagcagattatcgagcgtatcgaacgctatagccacgtctcgctggccgcggcgtttgcccgcccggagctgcaaaacgagatcaaatggcatagcaagtacgcgcgccagaacggcatccacgtgtcgccgacctttatggttaacggcctggtgcaggcggatctcggcagcggcgacgacgtcagcgtatgggccgcgcggattctggcttagtacgactctcccgcgccggcgcggtagcgccagcgacacgacatcaacacctcactaaaaaggcagatcagcatgtcagagaataactaccagccacctaaagtgtgggaatggaagcaaaacaacggcggcgcattcgccaatatcaaccgtcccgtctccggcgcaacgcacgatcgggagctgccggtgggcgcgcatccgcttcagctctattcgctggggacgcccaacggccagaaagtgaccattatgctggaagagctgctggcgttaggcgtcagcggcgcggagtacgacgcctggctgattcgcatcggcgaaggcgatcagttctccagcggctttgtcgaggttaatccgaactcaaaaatccccgcgctccgcgaccactccaccactccgccgacccgcgtttttgaatccggcagcatcctgctctatctggcggaaaagttcggcttcttcctgcccaaagatccggcaggccgcgccgaaaccctcaactggctgttctggctgcagggctcggccccgttcctcggcggcggctttggccacttcttcagctatgcgccggtgaaaatcgaatacgcgatcgaccgctttacgatggaagccaagcgccagctggacgtgctggacaagcagcttgcccgcggccgttttgtggcaggagaggagtacaccatcgccgacatggccatctggccgtggtacggcaacgtggtgctggggaatgtttacaacgccgccgagttcctggatgccggtagctataaaaacgtgctgcgctgggcgcaggatgtgggtaagcgccccgccgttcagcgcgggcggatggttaaccgcacctcaggcccgctcaacgagcagcttcacgagcgccatgacgccagcgacttcgacacgcaaaccgaagataaacgccaggcgtagcgcccatgcccgccggaggcttccgcctccggtttttagctttccagccgatagcccgccataaagtagcgctgcgcggtcgaggaacagccctctttgaagaagtccatcaccatatctctttccagaccatagcgacgggtaaggatccccgcttcccaggcgctgagctggcggtcgccggttttttcaaacatacggtgcgagtagccgagcacaaaaccgcgtttatagtcggcgcaaaaattcgccgcatgggcggcggtgtcagcatgggatgcctgtagccccgccattaagccttttccaaaatgattttccatcgcgccctcccaatcgttatatataaaattatatagcgattttttgagcgagcggtagcgctatttatggcgtttgcgctagcgcatatacttctcaaaccacgccagcgtgcgttgccaggccaggtcagccgcggcccggtcgtagcgcggcgtggagtcattatgaaagccgtggttaacgccctgataaatataggcctcgtagactttattatgcgccttcagcgcgttttcataggcgggccagccttcattaatgccgctatcgagtccggcataatgcagcagcagcggcgctttaattttatcgacctcattcagcggcggctggcggccgtaaaacggcaccgcgcaggccagctcagggatcgccaccgccgccgcgttgctgacgccgccgccgtagcagaacccggtgataccgaccttccccgtcgcctgcggatgcttcgccataaacgcgaccgccgcaaagaaatcattcatcagcttcacgggatcgactttctgctgtagcgcgcggccttcatcatcattaccgggatagccgccgacggagctcaggccatccggcgcaagcgcgatatagcccgctttcgccacccgccgggcaacggcttcaatatagggattcaggccgcgattctcatgaaccaccaccacggcgggcgctttgtcggctattttcaccggcgtcacctgataagcccgcacttcgccgtggccgtcaggagaagggtaatgaatatactccggacggatatccgggtcggtaaacgccacctgctccgccagagcatagtcgggcttcagcaggttaaacagcgccagcgcggtcatcccgccgacggtatacttccccgccagctggagaaactcgcgtttgctgattttgccgtgggcatagtagtcatagtattcgagcagctgctgcggaaaatctttggccgttagtcgcgtcatcaccctgcctccgttattaagcgccctttaagcaaagcagaagcccggacatacgccagcggagaaaagcagaaacggggagtaaaaagcccagcggccaacaccgccgggagaggagggatcagtgtttcactttggtcagacgatcgaggtagcccatcacaaaggccgacagcacaaaggtcaggtggatgatgacgtaccacatcagcttattgtccgggacgtttttcgcatccataaacacccgcagcagatgaatggaagagatcgccacgatggaggcggcaaccttatttttcagcgaagtggcgtccattttgcccagccagctgagcttctccttgccctcgttgatatccagctgggaaacaaaattttcatagccggagaacatcaccatcaccagcagaccgcccaccagggtcatatccaccagcgacagcagggtcagaatcatatccgactcactgacgctgaaaatatgcggcagtatgtggaagatctcctgaaaaaatttgatcgtcagcgcaatcaaaccgagcgaaaggccaaaataaaccggcgccagcagccagcgcgaggcgtacatagcattttccagaaagcgttccataagatcctgtcagttaacataaacggccgccattataccgcaacagggcaacgttatagcaacaggcgtccaacaagagagcgattcgaggcgataaaaaaggctggcgcaaggccagcctgagaagatgggtggagagaggttacttcgctttgacggtttcttcgcccaccaggccaatcttcagatagcccgcctggtgcagggtatccatgaccttcatcatcgtctcgtagtccacggttttatccgcgcggaagaagacggtggtgtctttcttgccttcggtcagcgcatccagcgaggcgatcatgctctcgtcggtaatggggtcattgccgaggaacatggttttatccgccttcaccgacagatagatcggcttttccggacgcggctgcggctggctggaggaagcaggcagattcaccttcacgtcgacggtagccagcggcgccgccaccataaagatgattaacagcaccagcatgacgtcgataaacggcgtcacgttgatgtcgtgcatttcgccgttatcatcgaggttttcgttaaaatgcattgccataaagcattaacctacgcgtagtttctgggcggtacgtaccggcttaacgccgctggcgctcaggtccaggtcgcggctttgcagcagcagaacctgggcggcgacatcgccaagggacgctttgtagctggcgatcatgcgggcaaaaatgttgtagatgaccaccgccggaatcgcagcgaacaggccaattgccgtggccagcagcgcttccgcgatacccggtgcaaccaccgccaggttagtagtctgggtctgggcaatcccgataaagctgttcatgatgccccagacggtaccaaacagaccaacgaacggagaaatcgcgccgatggtcgccagataaccgttgccgcgccccatgtaacgacccaccgccgccacgcgacgctccagtcggaaaccggtacgttctttaatgccttcgttatcttcagaacctgcggaaagctccagctcgttctgcgcttcgttaatcaaccgcgaggtcaggcttttcgcatcgaaaccgttagcgatatcgctggcctggtcgagagagcgtgcttcagcaaccagcagctgttcgcgcttgaggcgacgcttgctggccaggatctctgcgcctttgccgaaaaagatagcccatgtgactaccgacgccagaatcaggccgatcatcactaccttaacgacaatatcggcatgatgatacataccccaaacggagagatccgcctgcatcaaattattacccacactgtatctccaggacgtaaatcacaaaatctgcgcacaataatatcaaaacgacatcgaattgatagtggttctcattagtatttacactgtgcagcaaatcacgtttattttccttgcgcttacgcagtaaaaaagttgctgaccgcgccgttgataaaatttttacctgtatccgccgcgacccggtacatcaacgggtattcatgttagtttagacgtccagacgtataaaaacaggttatctgaacatggctgataaacatcttgatactgcgctggttcacgccgggcgcagcaaaaaatacaccctgggctcggtaaacagcgtcattcagcgcgcctcatcgctggttttcgacaccgtcgaagcgaaaaagcacgcgacgcgcaaccgcgccaaaggcgagctgttctacgggcgtcgcgggacgctaacccatttctccctgcaggaagcgatgtgcgagctggaaggcggcgccggctgcgccctcttcccctgcggcgcggcggcggtcgcgaataccattctggcgttcgtcgagcagggcgaccatattctggtgaccaacaccgcctatgagcctacccaggatttctgtacgaaaattctcgccaaactcggcgttaccaccggctggttcgacccgctcatcggcggcgatatcgcccgtctggtgcagccgaacacccgcgtggtgttcctcgaatcccccggctccatcaccatggaagtccatgatgttccggcgatcgtcgcggcggtacgtcgcgtcgctcccgaagccatcattatgatcgacaacacctgggcggcgggcgtgctgtttaaagcgctggagtttggtatcgatatctccattcaggccggcaccaaatatctgatcggccattccgacgcgatggtgggtaccgccgtgtccaatgagcgctgctgggcgcagctgcgcgaaaacgcctatctgatggggcaaatggtggatgccgataccgcctatatgaccagccgcggcctgcgcaccttagcggtacgcctgcgtcagcaccatgaaagcagcctgcagattgccgaatggctggcgcagcatccgcaggtggcgcgcgtgaatcatcccgccctgcccggcagcaaaggccatgagtactggaagcgcgacttcaccggcagcagcggtctgttctctttcgtgctcaataaacgcctgaccgacgccgaactgtccgcttatctggaccacttcagcttgttcagcatggcctactcctggggcggctttgaatcgctgattttagccaaccagccggaacacattgccgcaatccgtcctgatgctgaagttgatttcagcggcacgctgatccgccttcatatcgggttagaaaatgttaccgatctgctggatgatttagcggcgggcttcgcgcgtatcgtgtaaagtgacagtcagtggcaacaatagcggacgttttttagaaaaacggccgctttagttgcgcccgggatcaaggtgcccgagcctcttcaggagtacactagacaaaaaacacggtaccacttaggaaagtccatggttgtcattcaagaaattgtcgccgcgctgtggcagcatgattttgccgcgttggcaaacccccacgttgtgggcgttgtatatctggtcatgttcgcaaccctgtttctggaaaacggtctgctgcccgcctcatttttaccgggcgatagcctgctgctgctcgccggggcgctcatcgccaaaggcgtaatggactttgtacctacggtcgccattttaaccgccgctgccagcctcggctgctggctgagctatatccaggggcgctggctgggtaacaccgttacggttaagcgctggcttgggcatctgccgcataagtaccatcagcgggcaacctgcatgtttgacaaacacggcctgctggcgctgctggccgggcgtttcctggcgtttgttcgcaccctgctgcccaccatggcgggcatttccgggctgccaaaccgccgcttccagttcttcaactggctgagcgcgctgctgtgggttggcgtagtcaccggtctgggctatgcgctgagcatgattcccttcgttaagcgccatgaagatcaggttatgacctgcctgatgattctacctatcgcgctgctgatcgccgggctgctcggtacggttatcgtggtgattaaaaagaaatactgtaacgcctgatcgtttaccggggcggcgcggattcgccgcccttacatcgttcgtcacatcccctgaatcgttctgatacgcgccgcatcctcccccggcgtcatgccgaaataacgcttaaactcgcggctgaactgcgacgcgctttcataccccacccgcatcgccgccgcgctggccttcataccatcgtggatcatcagcatgcgcgctttatgcaggcgataggttttcaggtactgcagcggggaggtgctggtgactgatttaaagttatggtggaacgccgagacgctcatattcgcttctgccgccagctgatcgacgctgaggttctctgtgtactggctttcaatacgcttcaatacgcggctaatcaggctgaagtgggtctgacgactgaccagcgccagcagcgcacccccgcacggcccggtcagcacgtgatagagaatttcgcggataatctgtttgccaagaatgcgcgcgtccagcgggcgctccatgacatccagcaggcgctccgccgcgcacaatatctcttcggacagtaccgcagagttgattccgctcgacgccatggacggctgaaactgctcatcttccccgatatccatcagcagttcttgcaactgaagaatatcgacgttcagccgaatccccgccagcgggacttccggagtggcgaaggtttcgcattcaaacggcagcggtaccgtcagcagcagatactcattggtgtcatagcgaaaggtgcgctcgttaatgtagccaattttatgcccggaaaagagaaaaacgatccccggctgatacataaccggcgtgcgcgtccccggctgggtaccgtacagcaggcgaatatccggcagcagagcattaagcatttcttctttatctttcagctgattaaccttatgcgttaatagctggcatatctcagcgcggttcatttatcgtgcttctccgaacgtttttataccttcgcattgtgcgcacttccggcgaatttctccagccccaaggagaaatgggcaagacaacggcaggaatgtgcattgaggggaacggcccgcgggaacacaatgtccgtcatctggcagaggtattgtctctgttggcggttttatctatttgagggcaccagccatgaataatttcgacctacataccccaacccgcattctgttcggtaaaggcgcgattgaaaatctgcgcgatcaaatcccggcggatgcacgcgtgcttgtcacctacggcggcggtagcgtgaagaaaaccggcgtgcttgatcaggttctgagcgcgctgaacgacattgacgttcgggaatttggcggcatcgagccaaacccgtcctacgaaacgctgatgaacgcggtgaaaatcgcgcgtgatgaaaagatcactttcctgttggcggtgggcggcggctccgttctcgacggcaccaaattcatcgccgcggcggcccactacgatgccagtatcgatccgtgggaaattctcgaaacctacggcagcaaagtggccagcgctatcccgatgggctccgtgctgacgctgccggcgaccggttccgaatccaataaaggcgcggtgatctcgcgtaaaaccaccggcgacaaacgcgcgtttatgtccacccacgtccagccggtgttcgctattctggatccggtttacacctacaccctgccgccgcgccaggtggctaacggcgtcgttgacgcattcgtccataccgttgagcagtacgtcacctatccggtcgacggcaaaatccaggaccgctttgccgaaggtattctgctgaccctggtggaagacggcccgaaagcgctgaaagagccggaaaactacgacgttcgcgccaatattatgtgggcggccacccaggcgctgaacggcctgattggcgcaggcgtgccgcaggactgggcgacccatatgctcggccacgagctgaccgccatgcacggtctcgatcacgcccagacgctggctatcgttctgccggccctgtggaatgaaaaacgcgatgctaaacgcgccaagctgctgcagtacggcgcccgcgtctggaacatcaccgaaggttccgaggaagagcgcattgacgccgccatcgccgcaacgcgtgatttcttcgaacagatgggcgtcccgacgcgcctttccgcctacggtctggatggcagctccatcccggcgctgctggcgaaactggaagagcacggcatgacccagctcggtgaaaatcaggatattacgctggacgtcagccgccgtatttacgaggctgcgcgctaatcaacgccctctccgacgcgtaaactcgcgcaaaggagaggagtttaactaccgtttttagctatttcgtccagacttaatgctacccctcggcggaatttattccgctgagttcattaacaggaggaaggcatgacacatccaaccgttataaaactacacgacggcaacctgatgccgcagctggggctcggcgtgtggaaagcaggcaacgaggaagtcgtctccgccattcataaggcgctggaagtcggttatcgctcgtttgacaccgccgccgtgtaccagaatgaaaccggcgtcggcaatgcgttaagcagcgcaggcgtcgcccgcgatgagctgttcgtcaccacgaaactgtggaatgacgatcaaaagcagcccaaagaagcgctgcaggaaagccttaaaaaactgaagctcgactacgtcgacttatacctcattcactggccggttccggcaactaaccattacgtcgacgcctggaaaagcttaattgagctgcagcggcaggggctggtaaaaagcatcggcgtctgtaatttccaggttcatcatctgcaaaaaatcatcgatgaaaccggcgtcgctccggtgataaaccagattgaacttcacccgctgatgcagcagcgccagcttcacgcctggaatgcgacgcataagatccagaccgagtcctggagcccgcttgcgcagggcggcgaaggggtattcgatcagaaaattattcgtcaactggcggataaatacggtaaaaccccggcgcagatcgttatccgctggcatctcgacagcggcctggtggtgatcccgaaatcggtgacgccatcgcgcattgccgagaattttaacgtctgggacttccgtcttgataaagatgaattgagtgaaatcactaaactggaccagaacaaacgcctggggccagacccggatcagttcggcggttaacctttcccgctccgtcggcttccggcggagcatcgctttgctatctggctaaaaccacgtacattcagagtttattgcaatcaaatggatgcgtgctgatgagctgtattttctgccaaattgttgaggggaaagccccctgccataaggtgtgggaagatgaacaccacctcgcctttctctctattttccctaataccgacggttttacggtcgtgatcccgaagaagcactaccccagctatgcgtttgatatgccgccgcaggcattggccgatctggtgctggcgacgcagaaggtggcgaagcttttggataaagcctttgatgacgtgggccgtacggggatgttttttgaaggctatggcgttgatcatgtccacagcaaactcagcccgatgcacggcaccggggatatgacccaatggcggcctatcgagtcgcgtcagtctaagttttttgcgcaatatgaaggctatctctcctcccacgatcatgagcgggcggatgatgaaaagctggcggcgctggcggccagaatcagagaggcatagccatagaatttgctttgccgtttggcaagcggctgcccgggcccgaaattatcaggcccggtcagcgaagcgccagcgggcaatgcagtcaaattaacgaccggcgaccttaccgcgttttacgggcttcttcgccgtttccccgccgttcgagcgctggtgcacaatcggcgtatgcttggtcagcgccggacgggtatggcggttctggcgacgcgcttcgcgcatttcgtcgatcgtcggcgccggtaccaggcaatcgcgacggctgccgatcaggtgctttttacccatggtttccagcgcctggcggatcagcggccagttggccggatcgtgatagcgcagcagcgccttgtgcaggcggcgctgtttgtcacccttcggcaccaccacatcctcactcttatagccaatcttacccagcgggttcttgccggtgtaatacatggtggtcgagttcgccagcggcgacggatagaagttttgcacctgatccaggcggaaacgatgctgtttaagccacagcgccagattcaccatatcttcatcccgcgtgccggggtgggcggaaataaagtatgggatcagatactgctctttaccggcctgcttcgaataggtatcaaacagctgcttaaagcgatcgtagctgcccatacccggcttcatcattttcgacagcggtccctcttccgtatgctccggggcaatcttcagatagccgccaacgtggtgggtagccagctctttgatatagcgcgggtcttcaacggcgatgtcgtaacgtacgccggaagcgatgaggatctttttgatgcctttcaggtcacgggcgcggcgatagagattaatcgtcggctcgtggttggtgtccatatgcgggcagatatccggataaacgcatgacaggcggcggcaggtctgctcggcgcgcggcgacttgcagcgcagcatatacatgttggccgtcgggccgccaagatcggaaataatgccggtaaagccgggaaccgtgtcgcgaatcgcttcgatttcattgatgatcgaatcttcggaacggctctgaataatacgcccctcatgctcggtaattgagcagaaggaacagccgccaaaacagccgcgcataatgttaatcgagaagcggatcatctcgtaggccggaatgcgggcatcgccgtatgagggatgcggaacgcgcttatacggcagggcaaacacgctatccatctcttcggtggagagcgggatggcgggcgggttaacccagatatagcgctcgccgtgcttctgcatcagcgcgcgggcgcagccggggttggtttcatggtgcagaatacgcgacgcgtgcgcgtagagaaccttgtcgcctttcaccttctcaaaggaaggcagcaggacgtaggtcttctcccacggcttcggacgcgggggctgcacggtaacgcgcttcgcttcctgttttggcggtgcgacggttttgttatccgcgcacggcaaatcttcaccgtacggatgcggaatcgggtcgattttccccggcgtatccagacgcgtggaatccactccgctccagcccggcagcgcctctttcaccatgatggcggtgttgcgtacgtcacgaatttgcccgatgggctcgccggcggccagacggtgcgccacttccaccagaggacgctcgccgttgccgaacatcagcatatcggctttggagtccaccagaaccgagcgacgcacggtatcagaccagtagtcgtagtgcgcggtacggcgcaggctggcttcgataccgccgaggatcaccgggacatctttccacgcctctttacagcgctgggtatagaccagcgtggcgcgatccgggcgtttaccggcaacgttacccgccgtataggcatcgtcatgacgcagcttgcggtcggcggtgtagcggttgatcatcgaatccatgttgccggcggtgacgccgaagaacagattcggtttacccaggcgcataaaatcgtttttattattccagtccggctgggaaataatccccacgcgaaatccctgcgcttccagcatgcgtccgcaaatcgccatgccgaagctcgggtgatcgacataggcatcgccggtaaccagaatgatgtcgcagctatcccagccaagttgatccatctcttctcgcgacatcggcaagaacggcgcggggccaaagcaggcggcccagtactgcggccaggagaaaaggtcacgatccggttggatcagggatattgcgctcatattgcttccggggaaatgataaaaaaataatcaaaaagggcggcgattataagccggaacgatggaagaaatgaaggaggtttttccgatcccggccggcaggggccgggacagaatacattacggcgccggattcaccagaatctggccaatggagccccggtcggcaagctccagcgtctggcttaaatactggaacgggaagtgcggccaggagggctgattgtaatagaccaacagctcaacctggccgtcgatccaaacggtatccttccagccacgatcttccgggaacggcgcggagccgttgacgttacgcacctggaacatgacgccttcaatatggaacgactgcggccggtcggcgcgcacaatccagcgctcccaggtgccctgctgcgccgtaatatcgatacgctgcggatcccacagctgaccgttgatccccggatcgtcgccaagggtgatctcacggctgcgaatcgccgcgccggccagaatttccgtcggcagcaaacgcacgggcagactatcggtcaccagcggcagcaggcccgtcgggcgcaatgtcagaatcagcgtggagatcagaatgctcgacggctcgaagaagccgcgaatacgatcgacgatgcttgccgcttccccgcaggtgatagacacttcatcgccgttggtcatatcgaccagaatttctcgacgctcgcccggcgccagcgacagctgtttcagcgaaaccggcgcgggcaggagcccctggtcaccggaaatcacgtgcagcaatcggccatcgctcatctgcagctgatagcgacgggagttggacgcattcagcaggcgcaggcgcacccagccgcgcgacacctcaacgaaaggcccctgtacgccgttcaccagcagcgtatcgcccacgaaaccaccgctaccgggctcgctgtattcaggcgtaccgaagttatccagacgcttgtcctgaataatcaccggaaaatcatccacgccgtagtgattggggatcggcagattcttactgacatcatcttccaccagccacattcccgccaggccgttatagacctgttttgccatatggtttggggtgttagcctgataccacagggtcgccgcgctttggcggattggcagtaccggcgcccagtcggcgttagcggacatcatgcgcgcggcgccgccgatcagcggaccggggacctgcagaccacggatggtcatcgccacgttttccgtcaggcggttgctgtagatcagcttgacatcgtcgccgttccagacgcgaatggttggccccatatagcgaccgttaatcccccacaccgaggcgcgggtaccgggcgtaaacgaccagtgcgcgcgctgtagcgtcaagaatagcggctgcccgcggcgggactccagcagaggggggatcggcagcgcaggctgctggccagcggcctgtgccttcagcggcgcggcgcccgcgcacagcgctacgcctgaagccttaatgaactgacgccgactgagtgacatattaactccatgaaatactgactaattaataagggaattcgtttcccgccagcaatccgcgcgctgtttgcggcgtttcctgtgttatttctttgcggccgcttcgcgttcggcaacttctttatccagctcagcgattttcgcggacatcagctcgcggcagtgcgtggccagcgcgcgaacgccctcttttccatactggctggtatctaccggcggcagcatttctacaatcaccagaccgttattcaggcgattgagattaattttattcgatgtattagacacgcacaccggaataatgggcacgccagccgcgacagcagcatgaaaagcgccggttttaaaaggcagcaaaccgcggccgcggctgcgagtcccttccggaaacatccaaaaagagatattgcgctttttaaatgcgttcacgacttcggcaatagtgccatgcgcctttgcccggttattgcgatcgatcagcaggttccccgtgagccagtagagctggccgaaaaaggggatccacgccaggctctttttacccacggtcacggtcggcggctgcacgatatttgatgccgtcaccatatcatagttattctggtggttagcgatatagatagcgttgccgtagctttccgcgtcggctggcttgcgcagctcgactttcaggccgaagaccggcgacagtttgccaaacaggtggccgaaggtggcgacgtgcttagggttacgcgggctgaacagacaataaatacagccgaagatgcagaccagaatacaatagatgacaacgataattagtcgaaaaataaatagcatagctacctctgaaacccaaaccgcttagaattatactcgctgtttcgcagattgcaggcatcgggcatcattgcaaagcgcgttgcgcatctcgaatgacgctggcggatattgttcatcgcaatgcctgaataaacaacgattttgcggtaaatattaacctcccccgccaaaccgcgggggaggatgctcctactcttcgctatcgcccgcggaggcgcgacgcggtgaatcaatctccacccggtcaattttctgtaatccgcgcatcagagagccgcggcggccgcgctcgccggtgactttttgcagctcttccgggcgtagtttgattttccgtttgccgacgtgaatcgtcagcgtactttgcggcggcagaacgaacaggtgcgccaggccatcctggcccgcagccgcttccgccgacggaatactgatgatcttgttgcctttgcctttcgacagctgcggcaggtcgctcaccgggaacatcagcatgcggccggctgcggtaatggccagcagcatatcggactcatcctcaatcaccagcggcggcattacgtgcgcgttatccggaaggctaatcaacgtcttaccggcacgattgcgcgcgaccagatcgttgaaagtacaaataaacccgtatcctgcgtcggaagccagcagcagtttttggtcatcggcctccatcagcatatgttctaccgtcgcccccggcggcagcgtcagcttaccggtgagcggctcgccctgtccgcgtgcggacggcagggtgattgggtcaatcgcgtagctacgcccggtggtgtcaataaagaccaccggctgattgctcttcccttttactgcggctttaaaactgtcgcccgctttatagttcagccccggcgcgtcgatatcgtggcctttggcgctgcgcacccagccgctctgcgacagaacgatggtgaccggctcggacggcagcatatcgtgctcgctcatcgctttcgcttcttcacgctcgcgcagcggcgaacggcgatcgtcgccaaaggcgtcggcgtcggcctgcagctctttcttcagcaggttattcattttgcgttcagacgccagaatggcctgcagatggtctcgctctttttccagctcgttctgctcaccgcgaatcttcatctcttccagccgggcgagatggcgcagttttaactccagaatcgcttccgcctgggtttcgctgatgccaaagcgcgacatcagggccggcttaggctcatcttcgtgacggataatttcgataacttcatcgatattcagaaacgccaccagcaaaccttccaggatatgcaggcgcttaaggactttttccagacggtagctgagacgacggcgcacggtatcgcggcggaaagtcagccattccgagaggatttccagcaggttttttaccgccggacggttatcgagcccgatcatattcaggttgatacgatagctcttttccagatcggtcgtcgcgaacaggtggttcatcacctgctccatatccacgcggttagagcgcgggacgatcaccaggcgagtcgggttttcgtgatccgattcgtcgcgcaggtcatccaccatcggcagctttttgttgcgcatctgggcggcgatctgctcgagcacgcgggcgccggaaacctgatgcggcagcgcgctgatcaccaccgcgccgtcttctttcgcccacaccgcgcgcatccgcaccgaaccgcggccattctggtagattttgcggatctcggcgcggggggtgatgatttccgcttcggtcgggtaatccggcccctgtacgatatccagcagatcgtccagcgaggtctgcggtttttcaatcagggtaatggccgcctgagcgacttcacgcaggttgtgcggcggaatatccgtcgccatgccgacggcaatgccggtagtgccgttgagcagaatattaggcaagcgcgcaggcagcatcttcggctcctgcaaagtgccgtcgaagtttggtacccagtcaacggtgccctgccccagttcgctcagcagcagttcagcatacttcgacaaacgggattcggtataacgcatcgcggcgaaggatttaggatcgtccggtgccccccagttcccctgaccgtcaaccagcggatagcggtaagagaagggttgcgccatcagcaccatggcttcatagcaggcgctatcgccgtgcggatggtatttacccagcacgtcgccgacggtgcgggcggactttttgaacttggcgctggcgttgagacccagctcagacatcgcatagacgatgcgacgctggaccggcttcaggccatcgccaataaacggcagcgccctgtccatgatgacgtacatggagtagttcaggtaggcgttttccgtaaattcatgcagcgcaaggcgctctgccatatcgctcattaatcgtgaatcctcaatctgcgtaccggccgttcggacggcaaaactaccggcgataataccctatctgacgccctgagtcacagggcgttaggctggttgaggaattcagtggacatccttcatttcagcggaagataaacgtccgtctgcagctcatgttcaccgacttcatgcacgaaagtgaggtagcgaaagaaaacagggaaatcgcgcagcgactctcccgatgcgggcagccagtcgcgataaagaaaccagatgctctgcgcgagcgtgtccagagagccgtgatgacgcaccactgcgcaacgtccgccggggatctcgccattcaccacgccgaagctgttttccggcaccggctggctgaccgtaccgccaatatcgaaacgaaaatcgtcagccggcgtggccgcggggtcgtcccaggagattccccaggttgcgcagctggcgaccggggacagaccgctcaccttgcgccaggcgataaacttcgcggcggtctcattgactaaatcagggttgccgcgatgccgcagcctcgcgatctgagtggtaggtagctggattattttaacatccatcgggtgttgctcctgtagcgtatgtttcggcacgcgtcgatgccattccagccagtccggctgttgacggaactggctggggctttgcgcgaaagcgctgcggaaggcacgactgaacgactcaggattctggaaccccgcatcaagggcaatatcgataatcttttcctgtggattaaacgccagtcgccagcaggcgcgacgcagacgtagccactggatatagcgatagagcggtaccccgctataggcgctgaattgccggtgaaaatgatacggcgagctgtgggctatcgcactaagcgtctccagcgacagcggcgtgtccagatggcgttcaatgtacaagcacacttgctgaaaacgcccggcaaaggccgggcttacctgagtatcgttcatcgcatcctcccggaaacatactctgacagagcgaggagtgcggttcctgaccgatcttgcttaagatgataagaaaattatggcgcgattttacgaatctgctttacgtcgatttccactgagttccagtctttatccacttcaccctgaatctctaccgtatcctgcggggttacggtcacgccgttccagcgcttgtgatcgatatcgacgttcacggtgccggagctgtcctggaatttatacaggtcgtcggaaatacgctccacgattttaccgcgcagggtcacccaggtatcgtcacgcaggcttttcgcattcgcaaccgtcgttacgctcccgttcgggccaatgaacccgccgttttgcgtggtcgtctggctggtttgcgtcgagccgggtccggaaaatccgccctgcccggcggccagtaccggcatggaaactaaggcgatgatagcggtcattgcggcgattttcttcatgatgtgttctccctttgtgtttatatcgtcactattacaccgggcaaaacttaacgacttcttaagcggaaaaaataaatttcattcctgtacagcgcgcgccgcaacgcgctttactgcgggaatatccgagggacacaggagcagaaaatgcgcattttactggtggaagacgacaaactgatcggcgacggccttaaaaccggactgaccaagctgggcttcagcgtcgactggtttacccgcggcgaagagggcaaagccgcgctgtaccacgccccttacgacgccattattctggacctgaccctgcccggcatcgatgggctggatattctgcgcgaatggcgcgacaaaggccgccacgaaccggtactgatcctcaccgcccgcgacgcgctcagccagcgcgttgaagggttacgtctcggcgccgatgactacctctgcaaacctttcgcactggttgaagtcgccgcgcgtctggaagcgctgatgcgtcgcgcccacggccacagcagcagcgagctgcggcacggcaatgttgttctcgatccgggccgactcacgaccacgctaaacggcgagagcctgccgctcaagccaaaggagtttgctctgctggaactcctgatgcgcaacgccggacgcgtgctgccgcgtaagctgattgaggaaaagctctatagctgggatgacgatgtctccagcaacgcggtagaagtacacgttcatcatctgcgccgtaagctcggcagcggcttcattcgcaccgtgcacggcatcggctataccctgggggacgcatgaaacgactgggtagactaagcctgcgcgtccgcctgacgctgcttttcctgctgctgaccagcgccgcctggggcattgccagccttgtggcctggcaacaaaccgccgacaaactggataagctgttcgatacccagcagctgctgttcgcccgccgcctgagcgcgatgaatgttgacgaactccataccctcgctccgcaggtacgggagcagaaaaaggtcaaacatggccatctcgatgacgatgcgctggctttcgctatctttaccgccgacggcaaaatggtgcttaacgatggcgaaaatggccaggatatccagtggggtaaccatcgggaggggttcagcgatggctacctgcgcggcgacgatgacgagtggcgcttcctgtggcttaccacccgcgatggtcgccatcgtatcgccgtcggtcaggagtgggattaccgccgcgagatggcgctggatatcgtcacctcccagcttacgccctggctggttgcgctgccgctgatgtttttgctgctcatcgtgctgttgagccgggagctggcgccgctgaaaaagctggccaccacgctgcgcgcccgggcgccggactccgccgaaacgctaaatagcgagaacgtacccagcgaagttcgcccgctggtcgacgcgctaaatcagctctttacccggacgcatgacaccatgatccgcgagcgtcgcttcacgtccgatgccgcccacgagctgcgcagcccgctggcggcgctgaaggtgcagaccgaagtggcccagctctcaacggacgatccgcaagggctggataaagcgctggcgcagcttcaccaggggatcgatcgcgccactcgcctggtcgaccagctgctcaccctgtcgcgtctggattcgctggcgcagctggacgatctccagactatcgcccttgatgaactgctgcagtcggcggtcatggagatgtaccaccccgcccagcaggccggcgttgagctacgcctgcacctgaacgcgaaaaacatcatgcgcaccggccagccgctgctgctgagcctgctggtgcgcaatcttctggataacgccgtgcgctatagtgccgccggacgccaggtcgacatcatccttgaggcgggtgaatttcgcgtacgcgacaacggcccgggcatcagcgccgaggccctgacgcgcatcggcgagcgcttttatcgccctcccggccaggagcagcccggcagcggccttgggctctccatcgtcaaacgcatcgccgcgctgcacgggatgacggccagcttcgacaacgcccgggacgacggattcgaggcgcgcattcgctggtagcggcattattgcgaaaaaagcaaaagactttgcacattttgctcattttaccgctctgccctgcggggtaaaattagcctcaaaattgaaaagttgaggataaaaaatgagcaacatcctgattattaacggtgcgaaaaaattcgcccactctaacggccagctgaacgacaccctgaccgaggtcgcggatggctatctgcgcgacgccgggcatgatgttaaggtcgtccgcgccgagagcgactacgacatcaaagaagaagtgcagaattttctctgggcagacgtggttatctggcagatgccgggctggtggatgggcgcaccgtggacggtgaaaaaatacattgatgatgtctttaccgaaggtcacggcgcgctgtatgccagcgatggccgcacccgctccgacgccagtaagaaatatggttccggcggcctgattcaggggaaaaaatatatgctgtccctgacctggaacgcgccgatggaagcgttcaccgagaaagatcagttcttccacggcgttggcgtcgacggcgtgtacctgccatttcataaggccaaccagttccttgggatgagcgccctgcccaccttcatcgccaacgatgtgatcaaaatgcccgatgttccgcgttatacggcagaatatcgcaagcatctggcggaaatttttggttaactgtagtgagttatgaaaagacgacaagcgcggctcattttagcggcggcttgaagtatgatgagaatatacagaaggagttgagttaaccatgttgacagtgatcgctgaaattcgcactcgtccgggccaacaccatcgtcaggcggtgctggatcagttcgcaaaaattaccccgaccgttctccaggaagaaggctgccacggctatgcgccgctggtggatcacgccgctggcgtcagttttcagactacttcaccggattctatcgtgatggtcgagcagtgggaaagcgtcgcgcatcttgaagcgcacctgcagacgccgcacatgaaagcctacggcgaagccgtgaaaggcgacgtactggaaatgaatattcgtattcttgaagcgggtatttaagcaagcaaacgacatcggccggtttcccggccgattttttattatccgtccagctccgccagatcgcccttctcctgcagccagttacgccgatcttcagaacgcttcttcgctaacagcatatccatcatggcggtcgtctgctgctcgtcttcatcgttgataatcagctgtaccagacggcgggtattcggatccagcgtggtctcgcgcagctgcatcgggttcatctcgcccagccctttaaagcgctgcacgttcggcttgcctttcttgcgcttaagctgctccagcacgccggttttctcttcttctgtaagcgcgtaatacacctctttgccgaggtcgatacggtacaggggcggcagcgccacgtagacgtgaccttgtttaaccagcgtgcggaagtgcctgacgaacagcgcgcaaagcagcgtcgcgatgtgcaggccatcggagtcggcatccgccagaatacaaatcttgccgtagcgcagctggctcaggtcgtcgctatccggatcgataccgatggcgacggaaatatcatgcacttcctgggaagccagcacctcatcggaagagacttcccaggtgttcaggattttacctttcagcggcatgatcgcctgatactcgcgatcgcgcgcctgcttggccgatccgcccgccgaatccccttccacaaggaacagttcggttcggttcaaatcctgggcggtacagtccgccagcttaccgggcagcgccggaccgctggtcagctttttacgcaccactttcttcgccgcgcgcaggcgacgctgggcgctggagatcgccatttccgccagcagctctgccgactgaacgttctggttcagccacaggctgaaggcatctttgaccaccccggaaacaaacgcggcgcactgacgggaagagaggcgctctttcgtttgcccggcaaactgcgggtcctgcatcttcacggacaggacgtaggcgcagcgctcccagatatcttccgccgacagcttcacgccgcgcggcagaatattgcggtattcgcagaactcgcgcatggcgtccagcagcccctggcgcaggccgttaacgtgggtaccgccctgcatcgtcgggatcaggttgacgtagctttcggtcagcagttcaccgccttccggcagccacagcagcgcccagtcaaccgcttcggtatcgccggagaaggtgccgacgaacggtttttccggcagcagcggcaggccgttaaccgcttcgctaagatagtcggtcagaccatcggcgtagcaccagcgctgttcgctgtcgttaaccagatcgcggaaaacaatctctacgcccgggcagagaacggccttggcctttaataaatgagaaaggcgcgagacggaaaaacgcgggctatcgaaaaagctttcgtccggccagaagtgcacgctggtaccggtattgcgcttaccgcaggtaccggtcacgtggagatcttctactttatcgccgttttcgaacgcgatgctgtagacctggccgtcgcggcgcacgttcacctcaacgcgtttcgataaggcgttgaccaccgaaatccctacgccgtgcaggccgccggagaactggtagttcttattggagaatttccccccggcgtgcaggcggcaaagaatcagttcaactgccggaaccccctcttcagggtggatatccaccggcattccgcgtccatcgtcaatgacttccagcgactgatcggcatggagaatcacctccacgcgtttcgcgtgaccggccagggcctcatccacgctgttatcaataacttcctgaccaagatggtttggacgtgtggtatcagtgtacattcccggacggcggcgaaccggctctagcccggtgagtacctcaatggcatcagcgttatatgaagattgcgtcatggtgtgtattcgtaggtcgttccgaaccgctcagcgcaggcccagaaaatcgataatctgagtgaaatgatcttcaaagccaacaaatgcgtgattaccgccctcctctaccgtttgtcggcaggaggcgaaataatccacggcctggcggtaatcaagcacttcatcacccgtttgctgcaataaccagattaaatccggcgcttccagcgggtcaatttgcatgaccttgagatcgtaaatatggcgagactctagcacatattgctgccccgtgtatggattctcattggggccaaggaaattgttcaacagctcaaacgggcgcaccgcggggttcactaccacggcgggcagcataaagcactgcgatagccaggtcgcgtaatatccccccagcgacgacccgacaacgcccagcggttcaccgccatgctccagcacgatagactccagatgctcagccgcctgcgcgggataaaccgggagctccggtatcaccatcgagatgtcaggataggtctgcgccagccacgctttcagcgcagtcgcttttgccgaccgaggcgagctgttaaaaccatgcagatagagaagcgtagacatcagtatccttctgaagcgatatccgggtgaaatttcacgccttcgaggcggcaaacttcagtggtcaatgtgccgtcaggatgcagttccagccagcgccagcctggggagacggtatcgagcgtgaagttcgcgcagtgcggcttaaactgcacgcaggtggatggcgtggccatcatgcgccgtccgttccagtcaaggtccagctcctggtgaatatggccgcagagcagatgcttaacgcgaggaaaagcggccagcgcgcaatcaagcgccccggcattgcgcaggctatgctgatccagccagctacagcctgacggcaggggatgatggtgcaacagcagcagcgtataccgctgcggaacttcggtcagcttctgctcaagccattccagctggaaatcgctcagctcgccgtgcggcacaccgaacacctggctatccatcagcaatacttgccagtgttcgcccagcaatacgcgtttagcgggagagatgccggattcctgcagcgtactgtacattgccggttgaaaatcatgattacccggtagccagacgcagggtgcagtaaaactcgcgatgccttcagcaaaatgctggtaggccgcggcagagtgatcttgcgccaaatcgcctgtagcaacgatcaggtcgcactctcgctgtgaggcgtggatcgcatccagtacggcctgatagctttcccaggtattgatacctaacagcgtttcatgtttttcagcaaacaggtgagtatcggtaatttgtaatatcctgactctggcctcaccagccaaaggtaggtttaacaggctttccaaatggtgtccttaggtttcacgacgctaacaaaccggaatcgccatcgctccatgtgcaaaacagtatcgcagccaatcggccagaaactgattaatttgatgcttttcgtcgcgttgatgcaactttttattaggataatcataccgcgctttgaagcgaaagatctgctgacttgaacacacttcagcgaccattgcatcgtgatagagccgtaccgtcattgacggcagactccagtagctcaccgcaggcagagtctgttcaatcgccactaacgtagtgtagcgggtcgattcgatgatggttaatcggtattgcgcgttgcccacctggtaactcaccttttctcccgctgcatccgttcgcggcaacaggcggcgcagctgggcaaagttggtttcacacaggcgcatcatttcaggaaagtcaggcgtataacgcttcattttgtccactcgtttcgtaaattgtgataatgcagttgcagccattgcagcgcgatgacagaggctgcgttgtcgattttcccctcttccacccatctgtaagcctgttcccggctcaccacatgaacgcgaatatcttcgttttcgtcggccagtccatgaattccttttgccgtcgttgcatcgacttcacccaccataatagacagcctttcgctggtgccgccggggctggccaggtaactcagcaccggtttcacccggccaacaataagcccggcctcttccaccgcttcacgacgggcgacatcttcaggagactcaccttcttctatcataccggcgaccatttcgagcagccacgggctcgcgctggtatcatacgccgcaatacggatctgctcgacgagcacaacttcatcacgtaccgggtcaaagggtagcaagactgcggcgtggccgcgctcaaaaatttcgcgggtcacttcgccgctcatcccaccgttgaacaggcgatggcgaaaacgatataaatcgagcgaaaaaaaaccgcgataaagcgtttcgcgtgcaataatttctacatcgtttttagagaaggtaatcccctgctgattgacgtcgctcatttcgatatcctgtagaacatgaagttatgaatttataggcggtgtggctaccgttttacggctcgtatgctagattggtgcaaattaccgccccatggcacataacgccaactttttacggtaacagactctatacaatcagtgattatttttagaatttgagtagcgctaaatgcttcacaacaaggaatgcaaatgaagaaactctttcccatccttatcggcctgggcctgactggcttcagcgccatgagccaggctgaaaacctgctgcaggtttatcagcaggcgcgtgtcagcaaccctgatctgcgtaaatcagcagccgatcgtgatgccgcattcgagaagatcaacgaagcgcgtagcccgttattgccacagctcggtctgggtgcagattatacctataccagcggcttccgtgatgctaaagaccagaattccgacgtcaccagcggatcgctgcagctcacgcaggttctgtttgatatgtcgaaatggcgtgcgctgacgctgcaggaaaagaacgccggcattcaggacgtcacctatcagacggatcagcaaacgctgattctgaacaccgcgacggcctattttaaagtgctggccgcgatcgatacgctctcctataccgaagcgcagaaacaggctatttaccgccagttagatcagaccacccagcgctttaacgttggcctggtggcgattactgacgtacagaacgcccgttcgcagtacgatgccgtgctggcgaatgaagtcaccgcgcgcaacgacctcgataacgccgtagaagggctgcgtcaggtgaccggcaactactatccggagctggcctcgctgaacgttgatggttttaaaaccactaaaccgtcggcggtgaacgcgctgctgaaagaagcggaaaaccgtaacctgtcgctgctgcaggcccggctcagccaggacctggcgcgcgagcaaattcgccaggcgcaggatgggcatctgccgaccctgaatttaaacgcgtccagtagcgtatctaataacagctacagtggctctaaaaacaccacgcaggacagagatatcgggcagaaccaaatcggcctgaacttctccctgccgctgtatcagggcgggatggtgaactcccaggttaaacaggcgcagtacaactttgtcggcgccagcgagcagctggaaagcgcacatcgtagcgtggtgcaaaccgttcgttcctcttttaacaacgtgaacgcgtccatcagcagcatcaatgcctacaaacaggccgtggtgtctgcccaaagttcactggatgccatggaagccggttattcagtgggtacgcgtaccatcgtcgatgtcctggatgcgaccaccacgctgtataacgcaaaacagcagctgtccaacgcgcgttataactacctgattaacgagctgaacatcaaatccgcgctcggtacgctgaacgagcaggacctggttgcgctgaacaatacgctgggcaagtctattccgacttcaccggatagcgttgcgccggagaacccgcagcaggatgccagcgctgacggctacagcaacaccgccgcggcaaaaccggcatcagcccgcagcaccagcggcagcaatccgttccgccagtaatcaagcttgcgcagtccgcgcttcgcttacccgccgggtaagcgaagcgttaaacgtaaggcaacgtaaagatcccccgctttccgcccctattcgcttcattttccaccactcatcctctatcctgagcgttaacaaaacgcataccactgggtccaggaagacaaacatgaaacggacaaaaaatattaaacacgcctccttccgcaaaagctggagcgcccgtcatttaactcccgttgcgctcgccgtgacggcggtatttatgctcgccggttgtgaacaaagcgatgaaacggtttctctgtatcaaaacgccgatgactgctctgccgctaacccgagtaaatccgcagagtgcaccaccgcttacaacaacgcgctcaaagaagcggagcgtaccgcgccaaaatacgcctcccgtgaagactgtgtcgccgaattcggtgagggtcagtgccagcaggcgccggctcaggcaggcatggctccggaaaaccaggcccaggcgcaaagcagcggcagcttctggatgccgctgatggctggctacatgatgggccggatgatgggcggcggaatgggcgctcagcagccgctgttcagctcaaaaaacccggccagcccggcctatggtaaatacaccgacgcgggcggtaagagctacggcgcagcgcagccgggccgtaccatgaccgtgccgaaaaccgcgatggcgccaaaaccagccaccaccagcaccgtgacgcgcggcgggtttggcgactcggtcgctaagcaatcaaccatgcagcgtagctcagcaagctcctcttcttcacgctcgatgggcggctaagcgacatggaaagaatcagcattaacgagcgcccggactggcgcgaaaaggcgacagagtatggctttaactttcacaccatgtacggcgagccgtactggagcgaagaagcctattacaaactgacgctggcgcaggttgagaaacttgaagacgtcaccgctgagctgcatcagatgtgtctgcaggcggtggaaaaagtcatcgccagcgatgagttaatggccaaatttcgcatccccaaacacacctggggcttcgtacgccagtcgtggaaaacccatcagccctcgctgtattcgcgtctcgatctcgcgtgggacggcgtgggtgagccgaagctgctggagaacaacgccgatacgccgacgtctctctatgaagcggcattcttccagtggatctggatggaagatcagctgaacgccggtcagctgccggcgggcagcgatcagttcaacagcctgcaggagaagctgatcgatcgctttggcgagctgcgcgagcagttcggcttccagctgctgcatatggcctgctgtcgcgataccgttgaagaccgcggtaccgtgcaatatttgcaggactgcgccgcagaagcgggcgtggtaaccgagttcctctacatcgaagatattggtctcggagaaaaaggccagtttaccgatctgcaggatcaggtgattggtaatctgttcaagctctatccgtgggagtacatgctgcgcgaggtgttctccaccaagctggaagatgccggcgtgcgctggctggagccggcgtggaagagcattatctccaacaaagcgctgctgccgctgctgtgggagatgttccccaaccatccgaacctgctggccgcttatttcagcgaagatgcgcatccggagctggagaagtacgttatcaagccgatcttctcccgcgagggcgctaacgtctctatcgtggaaaatggcaaagtgctggaggcggtagaagggccgtacggcgaagagggcaccatcgtgcaggcgttctatccgttgccgaagtttggcgacagctacacgctcatcggcagctggctgattaacgaccagccggcgggtattggcattcgcgaagaccgggcgctgatcactcaggatctgtcgcgcttttatccgcacattttcgtcgagtaacatcgaaccccggcggcatcgtttactgccggggtttatctattttcaggcgccaatgaccactgacagcatgctcagggagcccatttccattccttcaaccgggatcgtaatcggctcttcaccgtcccaggcgcccagcacgtacagcagcggcagaaagtgatcggccgtcgggttcgataacgatccgccttcatgcgccaggtaattcaccagcggatgttccgctacgggacctttccagtccagattcgccttcacgtagtcattaaacgacgccgcccagggataaggtgtattttcgccgtgccagcgtgcggtacgcaggttatgcaccacgttgccgcttgccaccagcataatgccctcatcgcgcagctgggccagcttacgccccatttcgaaatgccatgccgcgggcttcgtactatcaatactcagctgtaccatcggaatatcggcatcgggatacattttaatcaacacgccccaggaaccatggtcaaagccccaggcttctttatccagcgtcaccggcaccggcgccagcagctcaaccagacgctgggccagttcaggcgaacccggcgccggataatgcgtatcgtagagcgcctggggaaaaccgccaaaatcatgaatcgttttcggcgcctccatcgcggtcactcctgtaccgcgagtgaaccagtgcgcggagatcaccacaatggctttaggccgcgccagcgtctcgcccagatgccgccaggcgcgagtatagatgttatcttccagcacgttcatcgggctaccgtgacctaaaaacagcgcgggcatgcgggtacgggacatagtgatatcctttattaagaaagttgatgtatttacattacgctctttctatggaggataaactcagataagcatgatgatgatcgtcagaaaatttgaatgtaagcggcggtaaagagtgaatccgcgcgctcgcgatcgtcaatggaacacgatactcttaataagaattattttcataaggaggtgaatgttgtcctcacccgtcattctgaccctgctggcagggagcgctacctttattggcgccattttcggcgttatcgggcagaaaccctcgaatcgcttactgggattctcgctgggattcgccgccgggatcatgctgctgatttcgttgatggagatgctgcccgccgcgctggctaccgaaggcatgtctcccctgctaggctacggcatgtttattatcggccttcttggctactttgcgcttgaccgcatgctgcctcacgcccacccgcaggatctgatgtctcccggcatttcccgcccgcgtaacctgcgccgtacgacgattttactgaccttaggcatcagcctgcataacttccccgagggcattgcgaccttcgtgacggccagcaataatctcgagctgggcatgggggtcgcgttagccgttgcgctacataacatcccggaaggactggcggtagccggaccggtatatgccgctacgggctccagaagtaaagcggtgttctgggcgggtctttccggcatggcggaaatcttcggcggcgtgctggcctggctggtgctgggcagcgcgatatccccggtgatgatgggcgccgttatggccgcggttgccggtatcatgattgcgctgtcggttgatgagcttatgccgctggcgaaagagctcgatccgcaaagcaacccgagctacggcgtgctgtgcgggatgtcagtgatgggattaagcctggtggttttgcaaacggtgggcattggctgagccaatgcgccaattatttgcagcgctatatttcacttgtcaatttatcacataaattcatcacaatgatggattgagaatagatatttgatttaacttttagtcaattaaaaccctacataaatagcgtttttacagcgcccctccatttatttggcattaacttaacgtaatttttcgggtatcacacgaaaattcattcacacaaacaataaacatacgtaaaaccaccgttaaaagagagtgtgtgttgagaaaaaccctaaaaaaagcgcattgaaatacatgtattaaggaaaactgcgagttacctttaattacaattaacatgcgtaacagtgagcagcatgatactttttacgcgttgaattaatattaattcaagcaaaaccaatcccataccagttgtcgtatacctcatatttaatattgatcatctataaaggactatattccatgtttaaaaaaacgctgcttgctgttgccaccaccgctgttttttctgcgacggtttttaatgccagcgcagaagatcagggccacggtattgtcaccttctccggtaccgttattacctccccttgctctgtgacaccggaaagcgctcagattgatgtcgatctcgggcaggttgccgatagcgtactgaacggcggccagtactctcagcctgcagatttctctatcaaactgcgcgattgtattctgagcacaacggatgataaaggcgttaaaacgacaacggataaagtgagcgtcaccttcacttctgccaacgtcgacagcagcgacgccagcctgatggtgaataccaaagaaagcaactacggtggcgctaccggcgttggcgtacgtatcatggacgcaggttacaacaccgtaaccctgggctccgcagtaccggtagtgtttaccgataccaacccgacgcagaatctggacttccacgcccgcatggaatctaaaggtaaaaatgcgaccgagggtgatgtttacgctcaggcaaactacgtcctggcttataaataattatcgctttcgcttaatttttattgattcaggccggtgagggattcaccggctttcccggtctattttattaaaagaaacggattttatgcgtactatcattcatagcggtttaacgccaggaaagctatcccttttaataaagcataccctatactcagtagctattatcgcatcgctatcaatgccgctttctgcactagaattcaataccgatatgattgatgcagaggacagggaaaatatcgatctctcacaatttgaaaaaaaaggttatatccctgtcggcacctatttggtgcgcatacagatcaacaaaaacaccttaccaaaagcctatcacctggagtgggtacaagccgataacgaaagcggttctcagctttgcctgactaaagagcgcctggcagagttcggctttgccgacgcgtttattgagccactacacgtgtgggctcaaaaaggctgtctcgatctcagccatcagccagaactgattattcgtctggataaagcgaacatggtgctgacgttaaccgtacctcaggcatggatgaaatatcaggctaaaaactggacgccaccggagtactgggacgacggtatcgcgggtcttatgctggattataacctgtacgccagccagtacacgccgagccacggcgacagcaaccagagcgtcaactcatatggcaccctgggtttcaatctcggcgcatggcgcttacgtagcgattatcaatacgatcaatcgtttattgagcgtaaatcaacgggaaccagcagtagcctgccgcgtacctatttattccgcccgattccgtccctggcgtcaaaattcacaatgggccagtacgacctgagctcaggcctctacgatactttccactttaccggcgcctctctggaaagtgatgaacaaatgcttccgccggatttacgcggctatgcgccgcaaataagcggcattgcacagaccaacgctaaggtcaccattacgcaaaacagccgcacgctctatcaaacgaccgtctcccccgggccattcaccatcgccgatctgggcacgaccttgcaggggcaactggatgttacgatcgaggaagaagacggacgcaaaagtacgtttcaggttggttccgcctctatcccttacctgacgcgtaaagggcaggtacgttataaaagttcactgggtaaacccacatcaacgactcacaacgatgtgaataacccccttttctggaccggggaggcttcctggggctggttgagtgatatctctctctacggcggcgctatcgtcaccgccgatgactatcaggcggcaaccggtggggttggctttaaccttaaccgttttggctcattctcccttgatattacccgcgccgaggccaatctacgtaatgacgatcaaggtaaacagcgcggctttagctatcgcgctaactatgccaaacgttttgaagaaacaaacagtcaggtaaccttcgcgggttaccgattctcagataaagaatacgtcacgatgagcgaatatatcagctcgcgcgatggttccgactccagttccaatgagaaagagagctatgtgctctcctttaaccagtacgttgcgccgctggagctaaatacctatctgagtatcacacgtaatacctactggaacagtcaaaccaatacgaactactcgttttctctgagccgtagctttgatattgccgcgtttaaaaatatttcagcttcattggcgatgagccgtgtgagctggaataataatcaagaaaatcaatattacctttcactctctctgccgctagaaaataatcgcaatattatgtacagcctgcagcgctatggcgacgacgcaacgacgcaaacggcaacctggtacgatggttcagatcgtaataacccgtggaatatgtccgtttcaggcacagataaagagtttggcgatggcgaagcggccatgcgcgggtactatcagcactattcaccctatggccggttgaatgtaaacggtagcgtgaagccgagcagctatcgctcgttcagcgctggctggaacggctcatttacggcaacccgttacggtgcggccttgcatgactacaacacaggcaacagttctcgcgtaatggtggatgcggatggaatagccggtgttgaggtgaacaataaccgtagtatgaccaatatgtttggtatttccgtggttccgtcagtgggtaactacacaactgcgacggtaatggtgaacaataacaacctgccggatggcgtggatgttaccaactccgttatccgcaccacgctgaccgaaggtgctattggctatatgcccctgagcgcgaccaaaggctatcagatcatcggcgttatccgcctggaagacggacgctatccaccgctgggcgtgaccgtaaccgacaaagcaaccggtcgcgatataggtttagtcgctgatgacggctttgtgtatctgagcggaatacaggaaaacagcatcctgacgctaaaatggaacgacaacgtgtgtgatatgacgccgcctaaccatagcaacatcaacggccaggccattattttaccatgtaaacccgcacattaattcaggatgaatgatgatgaaaattaacacgtttgcgaaaggactattatttctgttgggtaccagctttgcggtaaatgccgccgtgtcgcccgacagaacccgcattattcttaaccagtcggataagagcgtctccgtgcgcttgaccaaccagagcacaacaatccctttccttgctcaatcatggattgaggacaaggataataaaaaatcccgaaactatattactgctgttccgccaatggtgcgcctggaggcgggtgagcaagtacaggtacgcctgattcctcagccaacgttgacgcagcttccggcagacagggaatcgctgttttatttcaatgtgcgcgagattccgcctcgctcggaacaaaaaaacgtcatgcaaatcgccatgcagagccgcattaaaattttctggcgaccaaaggctgtcgaagtgaagaacggacaggtgaatctgaccggtaaattcgatattagccgaacggccagcgggttaacgttaaagaataactccccctattttatcaccgttggttatatcggcacgaatggcaaaacgctgctgccaaaaacatccagcatgatggctgaaccgtttggccaggcgtcgcaggagattaaagacctgcctgctaatttccaggtgggctttattggcgattatggtggtctgaatatgtttaaaattagctgtaattcggtacaaatagtatgtcagtctgaaccagtgaaaaggggctaataatgaaaaaattattcattttttttattttgctgatttgccttttttcatcatcatcctgggcaatcgactgttatcaaaataactacggtggagaccatctcgttaccacatcactgccgccatttactgtccccgcagacgcacctgttggaaaaaaaatatgggaaagcggcgatattactgtaaccgtttattgtgatgaagcctcacataacaataaagatcccaaatcgccttggtcagaaaacgtttatgcttatattctggatagcttccataacaccgataacctggttaccaataattcttatctggcatttggtgtaacctataatggtgtggattacgacataccgaacacaaaaatcaatacaggcgcatgccttgatcaaatgagtgactttgaccagtcatataagcataaggcatgtaatggccatacaatccagaaaaacacgacatttaccgttcgttttcgcttatacgttaagctaaaatcaattccaccttcacagatagagtataattttcctgcagtcaccgtattagcctttgatggttctggaggaataaaccggctggcgcatgctaaaaacttgcactatgatattgacgggctttcaaacattcattttttagattgtagcgtagatattaaaatttatcccgaatcacaaattgtcgacttcggtcaaatatctgatagtgttatattgaaagaaccagcaaagaaaccatttagcatatccactattaaaaatgaagctgcgggatgtaccgataaatttgatgtcaaaaccagtttttatactaatgatacgctatacgataatactcatctggatatgggaaatggtcttctgatgcgaattaacgacaaaacaattaacagcgatatcgtgtataaccaatatgcaaattttgcaagctatattccaggtagcgctgcaacggtaacccataactacattgctgagttgacgaagcatccaacaaaaagtcttgtggaagggcctttcagtaaagatttaatcataaaaataaactatcagtagaccaattttacccacacaacgaacagtatcctccgactatattggaggatactgtttatgagcgcaacaactgcaatcagctggctttacgctcgtgttcgcgacggtaggccactaaatcttcaatcgtgaccacttccatattgtgctgctgagcaaactcaatgcactgcggcgcacgcgccatagagccgtcgtcgttggtcagttcacacagtacgcccgccggtttgaggccagccagggtgaccagatcgatggttgcttcagtatggccgccgcgggtcagaaccccgcccggctgcgcgcgcagcgggaaaacgtgtccagggcggttcaggtcggacggcttcgcgccatcggcaattgccgcgcgcacggtggtcacgcggtcagcggcggaaacgccggtggtcacgccttcagcggcttcgatggtcacggtaaaaccggtaccgtaggcgctggtgttgttctcaaccatcattggcaggtcgagctgtttacggcgatcttccgtcaggcacaggcagacaatgccgctgccgtggcgaatggtcagcgccatctgctcaacggtcatggtttcagcggcgaaaatcatatcgccttcgttttcacggtcttcatcgtcaagcaccatcacaccgcggccttcgcgcagtgcatccagagcacgttctacacgttcaaaagcggtaccaaaagaggaaagtagcgtctgattcatggtaaaaaaaacctcattaattgtatggttaccagaatcagggcagtcttaggagcgccggtttagcggcaaaagtcaacgcaagcgggtacaaacccggctgagccgttactctctcccatccggactctaaccgtcggccccggaattacaccggatctgctgacctttctgcatttgcagaaagcgctcgcgggctttcaacgctatggttgatttaccgccggtggggaatttcgccccgccctgagaataagcaaagcaactataacgctattgactatcgtcggcaatgcataagcttcaaacatttatggtttataggcgccgacgatcgcactacaatgagcggataaccgaccagagcaggaaaccaccatgattgacccgaaaaaaattgaacaaatcgcccgtcaggttcatgaatcaatgccgaaggggctccgcgatctgggggaagacgtggagaaaaaaatccgtcaggtgctccagtcgcagttaactcgcctggacctggtaagccgcgaagagttcgacgtgcagacgcaggtgctgttgcgcacgcgtgaaaagctggcgcttctggagcagcgtcttaacgatctggaaaaccgttcgccgagcgcgccggcagcgccggacgtcgaagagaagccgtaaaacaagcaacgggccgtcaggcccgttgtcgtatctgtactgcggtaagtagattagtgctccagctccgcttctggcgacatggttttattcgcctggcggcagtaaagttcatagcgttgacaaaaccattcgcgatgcgcttcatccatattaccaacaatggcctgaagatcgacgggctgaccttgtgcgttcattctggcgaagctctgggccagaaaatcaaaattcttcattaaatacatatcgtttttcttcatacgcatactccttcagccgttggtcttctgattggtcatatgctttttactgacttcagtatttatccttaccttagctttttttgtacgaaaaatgcgcctcaaatggcgatttgttgagccaaatcatttatgccgtcattaaataaaaagaggcccgcgattaggcgatcgcgggcctcttttgtcctgttttgcagcgttatcgccggttacgcctcggttagcgcgataattccggacataccgccgctacggtgcgaagagaaaacattactgtttgttatctttctggatcttcttgatgatgttggtcgtcgagcagccatcttcaaagttgagcaccagcacctcgccgccgtttgcccagacttcttcgctaccggcgatctgttccggcttatagtcgccgccttttaccagcagatccggcagaattccggcaatcagccgctgcggggtatcctcttcaaaagagaccacccaatcgacggcttccagcgcgcccagcacgatcatccgctgatccagcgggttgaccgggcgagagtcgcctttcagacgccgggttgacgcgtcgctgttcaccgcaacgatcagccgatcgcccagcttgcgggcgttagccaggtaggaaacatggcccgcgtgtaaaatgtcgaacacgccgttggtcatcaccactttctcgccgcgcttacgcgccgcggcaaccgccagcttcagctcttcttcgctcatcacgccaaaaccggtctcggaacgcccgcgtaccgcgttctccagttcgataggcgaaacggtagaggtaccgagtttgcccaccacgacgcccgccgccgcgttggcaaagtagcaggcctcttccagagtgttgccggaggccagcgtcgccgccagcacgccaatgaccgtgtcgcccgcgccggtaacatcatagacttcctgggcctgagtgggcatatgcagcggcggtcgccccggctgcagcagcgtcatcccctgctcggaacgggtcaccagcagcgccgagaggtcaaaatcggcgatgattttcatcccgcgctcaacgatctcttcttcatccttacatttacccgcgaccgcctcaaactctgagagattaggcgtcagcagggtggcgccgcgatagcgttcaaaatccgtgcccttcgggtcgataagcaccggaacgcccgcgtcgcgagccagcttaatcatggtctggacgctggtcagagcgcctttggcgtaatcagacagcaccagcgcgccaatggagctcagcgcctgctgaatacgctcgtgcatcggctgaggatcgacgccggagaaaccctcttcaaaatcgagacgaatcagctgctggttgcgcgacagcacgcgcagtttggtaatcgtcggatgggtcgggacggacacaaagtcgcacttcacgttgacgtcggccagcgccttgcttaacgcgcgggcggcatcgtcaatcccggtcaggccaaccagacgagaggtcgcgccgagcgacgcaatattcatcgccacgtttgccgcgccgccaggacgttcttcgatattttccaccttcaccaccggcaccggcgcttccggcgaaatacggctggtgggaccataccagtagcggtccagcatcacatcgccaaccaccaacactcctgcacgttcaaactctggcagcgttactttcattcctctctcctgcgagacgcaaactttgcgcgcgataatagcacacccggttttttagttaagccatcaaccacttctgccagctggcgctgacctgttcacgctcctggctaaacgcttctggcgccacgttccccggctgctcctgcagcgccaggtgatggagcgcatcgcgcagcgtggtgtaagcgtgagttaacgccctcgcctctgcctcgtccataatgtcgttctgcgccagcagttccagaatacggacgttatcggaccagcgcgtgagcttcggtttatcactggcatagcgtaggaccagatactgggtaataaattcaatatccgtgatacccccggcatcggctttaatatcaaagcgatcgtgatgcttattccccaggtgagcgcgcattttttcacgcatttcccgcacttcggtctgcagtttttcgccttctcgcggggtagtaagaatatcccgacgaatggcgtcaaagcgcgcctgtagctcaggatcgccatacactacgcgggcgcgaaccagcgcctgatgctcccaggtccatgcctcattttgttgataatcagcaaaggcatcggcggtggtcaccagcatgcccgccgcgccagaaggacgtaagcgagcgtccacttcgtacagaatgcccgacgaggtgcgagtgctgaaaagatgcatgatgcgctgcgccagccgcagataaaactgacgaccgtcgatttcgcgctcgccgtcggtcatcacctccatcggacaatcgtggaggaacaccagatcgagatcggaactgtagcccagctcccagccccccagcttaccgtagccaaccaccgcaaaaccgcgcccctggcgatcgtgcaggtgcgtcggctgcccgtagcgggccaccatctgcagccaggcctgctggaccaccgcgtcaatcatcgcctccgccagccaggttaagtgatcgctcactttcatcaccggcagggttccggcgatatcggccgcggcgatatgcagcagctgcgcctgcttaaactggcgtagcgcctccagctgctgctcttcatcatcttccggtacgcgcagcagatactggcgcagctcatcgcgataggcatcggtggccgtcggctgataaagcgtattcgggtccagcagctcgtccagcagcagcggatggcgagccagctggctggcgaccatcggcgacgccgcgcacaggctaatcaggtgctttaacgcgccggggaattcgctcagcagctccagataggttgtgcgggtgacaatcccggtgagcagcggcgtaatgcgcgccagcggcaccggggcatccgcgcgcgagcagatttcgctgagcagatgcggcatgagctggtcgagcacctgacggccgcgcgggccaatcgtgcgccggtccagctctttacgaaaatcggcgatcagcgccagcacgctgcggcgatcgctgtcggcgagatgcgccagcgccgggctggtatcatcctcctgcagcgcgtcctgccacagttcgcgccagtactcttcaagctgttcatccggcgactgggtttcatcgtcgccgatcaattcattaaacacgcgccgcacgttggccatctgctccgccagccgcgcgctgagcgtatcccagtcggcagcccccatcccccaggccagccgggcgcgattaagttcatcctgcggcagggtttgcgtctgctcgtcgttgatgctttgcagcaggttttccaggcgacgcaaaaacagataggcttcgcgcagcctctgcgcatccccttccggcagcaggtgcagctcttcgatggcggccagcgtcggcagcaaagcccgctgttgcagcatcggttcgcgtccgccgcgaatcagctggaagacctggacgataaactccacttcgcggatgccgcccgcgccgagcttgatattgtccttcagtccccgacggcgcacctcacgggcgatcattcccttcatgttgcgcagagactgaatcacgctgaaatcaatatagcggcggaagacaaacggccgcagcatggcgcgcagttcgctggcgtaaacgccatcgttatcgcccatgattcgcgctttcaccatcgcgtagcgctcccagtcgcgcccctgctcctggtaataatcctccagcgcggcaaagctcagcaccagcgggccgctgtcgccaaacgggcgcaggcgcatatccacgcggtagacaaagccatcctgggtgggctgatccagcaccttaatcaggcgctgcccgaggcgggtaaaaaactgggcgttgtccagctcgcgacggccgccgcgcgtggcgccatgctccggccaggcgaaaatcagatcgatgtcggaggagaaattcagctcgccgccgccgagcttgcccatcccgaggatcagcagcggctgcggcgtaccttcagcattacacggagtgccccattcacggcagcaggcggcgtatagccagtcgcgcgcagcgacgattaaggtctccgccagcgcgcttagctgctgcaggctgctctcttcgctgaccagcgatagcgcctgggcccaggcgatacgcaccatgatccgacggcgaaactggcgtagctcgcgcatcagcgcggcttcatcattgacctcggccaggcgaacctgcagccagtcggcatagtgatgccactcctgcgcctcgggaggcgcactttcaagctccgccagccactgcggctgcgcgatcagactctgttcgacgaaatcgctaaaggccatgaccgattgcgcccgatcgctcaacgtcgatacgggaaaatccgctggtagccggcctgcgaccgtctgccagtgctgctgtaattgcgaagaaagcggcatcttaggggctccctggcctgaaattatcgttttccactatgcagccagaacggctccgcggccagcgcctggcgacgaaaatattcgataacgctgctgtcgttatgcgcaatcgcccggcgggtttcttgccagttttccagccacggcgcggcagcgtcgatataagcgccggatagcagctgaacggtgtcaatttcacgggtcaggcgcggaagctgatcgacataaccgtcagcggacggctggcggaaggcgtttttcagctccgccgccgctctggagagctgaatatccgcgaagcgtttaaacgaaccggcaattttctgctctccggctgcgttcaggaagggacgccagccgcggtttatcagcagatcggtgagcgtcagcttggctctgacggtcgccacgctgaaaagcgccgcctgggcggtttcggcctccgccagcgccgcctcagcttcgctcagacgctcacgcagcagcgtggtggccttgcgcgggacaataccgccaaacagcaccagcgcgtgccgcacgcgggcaatagcgtgcaaaatctctgctttcgcttttgcattgccgcgattgaggagttcatcatgatacagccagtgcgccagcgcgctttccagcgccgcttccagaccctgctcgacgctggccttcggcgcgacgcgaaggatcgttaacgcggtcagcggacgttcttcattgccctgcgccagatgataaccgcgcgccgccttgctcaggctgccctgacgcagtacgccggtatccagcaggcgacgggcaagggtcagaatgtcctgggtagtaccggacagcagttccagctccagttcacaaatcggttcctgatgctcgccggctttaacttcgccgcggtcaagcgcaatttcaatttcgctgtcgccttctttgaccacccatctttcacgctcaaaatcggtgctgaaaagcggctgtacgttctgtgcgagcgccgccggcagttccccctgcggccagacctcagccggcagtttctccagcgccagctccggcgtgtccagaggaatgttgtattccggacgctgatgcaggccgccgacgacgcgcccggcaattttcagcgtcatttcatagcgcccctggtcgccgcgaatgcgcagccccatgtcgtggcggcgcagccagttatccgccgtttcatagtaaatattcagcaattgacccgctggcgtatgctttgcctccagcgcgttgaggtgctgacgcagcgcgtcaacgccatcctgagcgacgataaactttaattcgatttcttgagccatgactgaattcttccgcttatatgctgtgccgggaaattgcggcgaactaacaacgatatttcttgtcagtaaatagtattttgcggcgaatcgccatgcaatgcgcattttgccgggccacctcctggatgattccgattgtggcggaaaactttgcgtcgcttcggcgatgccactactatcgttcaactttttatgaccaaacgatgacctgatgccaaaattacgccttattacattgactttgctggcgctgagcgccgccacggcggttcacgcggaagaaaaacgttacgtttcagatgaactgaatacctgggtgcgcagcggtccgggcgataactatcgtctcgtgggcaccatcaacgccggtgaagaagtcgcggtgctgcaaaccaacgacagcacgaactatgctcaggtacgcgacaacagcggccgtaccgcctggatccccttgaaagagctgagcaacgagcccagcctgcgcacccgcgtgccggatctggaaaaccaggtcaaaaccctgaccgacaaactcaacaacatcgacaccacctggaatcagcgcacggcggacatgcagaagaaagtcgccggtagcgacgccgtgataaacggtctgaaagaagagaaccaaaagctgaaaaatgagctggttgtcgcgcagaaaaaggtaaacgccgcaaatctgcagcttgatgacaaacagcgcaccattatcatgcagtggtttatgtacggcggcggcgtgctgggcgtcggcctgatcctcggactggtgttgccgcacctggtaccgagccgcaaacgcaaagaccgctggatgaactaattcgtcttctctgccagacttacgtatcatcgtaagaaaataaagacgggagagtgaggcgtgaaggtttatctggtcggtggtgcagtacgagatgcgttattaaggctaccggttaaagacaaagattgggtcgtggttggcgccacgcctcagcaacttctcgacgcgggctaccagcaggtaggccgtgattttcccgtgttcctgcatccgcaaagccgcgaagagtatgcgctggcgcgcaccgagcgcaagtccggctccggctacaccggctttacctgctatgccgccgctgacgtcacccttgagcaagacctgctgcgccgcgatctgacgatcaacgcgctggcccaggacgccgacggccagattatcgatccctacggcggccaggctgatttacgccagcgcctgctgcgccacgtctcgcccgcctttagcgaggacccgctacgcgtcctgcgcgtggcgcgttttgccgcccgctacgcgcatctggggttccgcatcgccgatgaaaccatggcgctgatgcgggcgatggccgatgctggcgagctggcgcacctcacgcccgagcgggtgtggaaagagacggaaagcgccctctctacccgcaatccgcaggtcttcttccagacattacgcgactgccgcgcgctcaaggtgctgttcccggaagtcgacgctctttatggcgtaccggccccggctaaatggcacccggaaatcgacactggcctgcatacgctgatgaccgtcaccatggcggcgatgctctcgcccgaagtggatgtccgttttgccaccctatgccacgacctcgggaaagggctaacgccgaaagcgctctggccgcgccatcatggtcacggtccggctggcgttaagctggtcgagcagctctgcgcccgtttgcgggtgccaaacgagctgcgcgacttggcaaaactggtcgccgaatttcacgatctgattcataccctgcccatcctgcagccgaaaacgctggtcaagctgttcgataatatcgacgcctggcgcaagccgcatcgtgtcaggcaaatcgcgttaaccagcgaggccgacgtgcgcgggcgcaccggctttgaagcctgcgattatccgcagggtcgcctgctgctggaagcctgggacgttgcccggtcggtttcaacaaaagaggtggtggcggaaggttttcagggcgttgaaattcgtgaagagctgacgcgtcggcggattcaggccgtcgcccgctggaaagaaaagcgttgccctcagccgcgggactgagggcggacgcttagaagaagaccacgtagaccgctgccgcaacgataaaacggtagatggcgaacgggataaacgaaatacgtttaatcagctgcaggaaggttttaatcgcaatcagcgcgacgataaacgccgtgataaaaccgacggcaaacatcggaatatcaccggcgttcaggaagccaatgctcttgtacatatccagtacggttgcgcccatcatcatcggcaccgccagcaggaacgagaactcagaggccgcatagcggctgacgcccatcagcatcccgccggaaatcgtcgccccggaacgcgagaagcccggccacagcgccagacactggaagcagccgatgacgaacgcctgacgataggtcatatcatcaatgcccaccgcgcggggctgttttggcttcagcacctccgccgcgatcagcagcacgccgccgacaatcagcgcgtacatcacgtttatcgggttaaacagcgatttgatggtatcgtggaaaatcagccccagcaccaccgccgggatcatccccaaaagaatatggataagcgacaggcgaccgctgccctggccttcatgctcgggctttttgccaaaatgaatgccgataagaccaaacaggcggcgccagaacatcaccacaacggccagaatggaaccaagctgaatgacgacttcaaacgtattcgcagtatcgccttcaaaacccagcagatgaccgacaataatcatatgaccagtactggagacaggtaaaaattctgtcaacccctcaaccacacccaatattgccgctatcagcagcgagtgtatatcgctcatccaattaaaccctttaaaaagtaaaatgaaaaaaaccaggaacgaagaaccgagctatcaggcgtgcttatttggccacagacagcgcgcagaaaagtgagcgtacaggttgtacgtaaggatttcgagcgctgtcacagggcaaaacggcaaagaaaatagcctgatggccggattctatgaccggtataaacgcaatttgtttaacgagtatgacctgaaaagttttgtttcagattaaggccacgttcaataatgacgccgacgttagccgcccgggctaccgccccaggtttgctgactttaatacgtacccatggagattgaaacttttccagcagcaggtcggcaatttcttccgccacgcgttccaccagcgcaaaacgcccgccttcgacgtggctgattaccagttcgctgatatcagcatagctgagacaatcgctgacatcatcgctggccgccgctttgcggttatcccacgccatttcgatatcgaacaccagcttctgttcgatggtctgttcccagtcgtaaacaccaattgtggtgattaccgaaagttgctctataaatacaatatccatcacgacctgcctgctttttggctaaaccggataccacttccggccaattatgcgtattatccacagatgcaaagacatcccctaaataatttgcgttgcaggaagacagtgacgcggcaaggctccaggagcatagcgtcgctatgggtcccggcgagccaatgcgcggacaacgcgcagtgcgcaggggataaaacgacactttcaaaatggaacagctgatgagtgcaatcgcgcctggactggttatcctcgcctacctctgcggctcaatctccagcgccattctcgtttgccgcctcgctggccttcccgaccctcgcgacagcggctccggcaatccaggggcgacgaacgtcctgcgaattggcggcaagggcgcagccgtagcggtgcttatttttgacgtcctgaaagggatgctgccggtctggggcgcgtgggcgttaggcctgacgccgttctggctcggcctggtggcgatcgccgcctgcgtgggccatatctggccggtattttttaactttcgcggcggtaaaggcgtggccaccgctttcggcgccattgctcctatcggctgggatctcaccggcgtgatggccggaacctggctgctgacgattctgctcagcggctactcctcgctgggggctatcgtgagcgcgctgattgcgccgttctatgtctggtggttcaaaccgcagtacactttcccggtttcgatgctgtcatgcctgattctgctgcgccatcacgacaacatacagcgtctgtggcgtcgtcaggaaacccgcatctggacccggctcaaaaagaagaaaaaaacgccggagcagaaataacctttgctgcgccgcaactcgcggcaagtgagtcccaggtgattaaggtgaaccaacgcggctgcggctcgaagtatgacgggcataagcttttcatatgaccgggatgattggcccccgatcaatactcttcgctgctgttttatcttgattttgcaggggcgcgacattgcacggcaccgtgttaccacagaataaaaaaggctggcaggcctcgctggacctccagtttcaatttctcggcgggaaaaccacgctcgcctcccgtcgtcatgtcggtcccctcaccgttcagcgcccgttttatcccgaagaagagacctgccacctctatctgcttcatccgcccggcggtatcgtcggcggcgatgagctcaccattagcgcgacgttggatcccgggtgccacacgctgatcaccatgcccggcgccagcaagttctatcgcagcagcggcgcgcaggcgcgtcttcagcaaaccctgacgctggccgaaaactcaacgctcgagtggctgccgcaggacgccatcttctttcccggcgccaacgccgctttgtctaccgtctttcatctctccgcctccagcacgctgctggcgtgggacctgctgtgccttggccggccggtcatcggcgaagcctttagccacggcgcgctcgccaatcgcctggaggtgtgggtcgacggctctccgctgctgattgagcgcctgagcctggccgatggacagctggcctgcgtcgcgcagcagccgtgggtgggaacgatgctgttctacccggcgaacgaaacgctgctcgaaggcgtacgcgaaaaacttacgccgctggcaaactacgccggcgcgacgctcaccgacggcctgctgacggtacgctttctaagtgacgataatctgctttgccagcgggcgatgcgcgatatctggcaatttatgcgcccgcacctgaccggcaaatctccggtactcccccgaatctggctgacttaagagaacgctatggaactgacacccagagaaaaagacaagctgttgctgtttaccgccgcgctggtggcggagcgtcgcctggcccgcggtctgaagctcaattatcccgaatccgtggccctgattagcgcctttattatggagggcgcgcgcgatggcagaagcgtcgccgagctgatggaagagggacgccacgtcctgagccgcgaccaggtcatggaaggcgtgccggaaatgatccccgatatccaggtcgaagccaccttcccggacggctcgaagctggttaccgtccataacccgataatctgaggtagcgcgatgatcccaggagaatatcaggtaaaacccggccagatagcgattaacgtcggccgcgccacctgctgcattatcgttgaaaatcacggcgaccggccgattcaggtcggctcgcattaccacttcgccgaggtcaacccggcgctgaagttcgatcgccagcaggcgaccggctatcgcctgaatatcgccgccggcaccgcagtgcgcttcgaaccgggccaaaagcgcgaggtggagctggtggcgctggccggaacccgcgcggtgtacggtttccgcggagacgttatgggcgcgctggaggcaaacgatgagtgacatttcacgtcaggcctatgccgacatgttcggccccaccaccggcgataaagttcgcctggcggacaccgagctgtggatcgaggtcgaagatgatttgaccacctacggcgaagaggtcaaattcggcggtggcaaagtgatccgcgacggtatgggccagggacagatgctttccgccgggtgcgtggatctggtgctgaccaatgccctgatcgtcgattactgggggatcgtcaaagccgatatcggcgtcaaagacgggcggatcttcgcgatcggcaaagccggcaacccggatattcagccaaacgtcacgatcgcgatcggcgcggccacggaaattattgcggcggaaggcaagatcgtcaccgccggcggcgtcgatacgcatattcactggatctgtccgcagcaggcggaagaggcgctggtctccggcgtcaccaccatgatcggcggcgggaccggcccggcggcgggcaccaacgccacgacctgcacgcccgggccgtggtacatctcgcggatgctgcaggccgcggacagcctgccggtcaatattggcctgctgggtaaaggcaatggttcgaatccggatgcgctgcgtgagcaggtcgcggccggggttatcggcctgaaaattcacgaagactggggcgcgaccccggcggcaatcgactgcgcgctgacggtggccgacgaaatggacgtacaggtcgctctgcacagcgacaccctcaatgagtccggattcgttgaggataccctggcggccatcggcgggcgcactatccatactttccataccgaaggggcgggcggcggccatgcgccggatattattaccgcctgcgcgcaccccaatattctgccctcgtcgaccaacccgacgctgccctataccgtcaacaccattgacgaacatctggatatgctgatggtttgccatcatctcgacccggatatcgccgaggacgtggcgtttgccgaatcgcgcattcggcgggaaaccattgccgcggaagacgtcctgcacgatctgggcgccttctccctcacctcgtctgattcgcaggcgatgggccgcgtcggcgaagtggtgttgcgcacctggcaggtggcgcaccggatgaaggtccagcgcggcccgctggcggaagagagcggcgataacgacaacttccgtgtgaagcgctatatcgccaaatacaccattaatccggcgttaacccacggtatcgcccatgaagtcggttcgattgaagtggggaaactggcggatctggtgctgtggtccccggcgttcttcggcgtgaagccggcgacgatcgtcaaaggcggcatgatcgcgatggcgccgatgggcgacatcaacgcctctatcccgacgccgcagccggtgcactatcgcccgatgttcggcgcgctgggcagcgctcgccaccgctgccgtttgacctttctgtcgcaggcggcggcggaaaacggcgtcgctgaacggctgaacctgcacagcgcgacggcggtggttaaaggctgccgcacggtacaaaaaggcgatatgcaccacaacggcctgctgcccactattaccgtggattcgcaaacctacgaggtgcgcatcgacggcgaactgataaccagcgaaccggcggacgtgttaccgatggcgcaacgttatttcctgttttaaggagcgcaaatgctttatttgacccaacgggtggagaccccggcgcaggccacggccagcgttaccctgccgattgacgtgcgggtaaaaagccgcattaaagtcacgcttaacgatggccgtcaggcgggcctgctgctgccgcgcggtctgctgctgcgcggcggcgacattctcagtaacgaaaacggtagcgaattcattgaagtgatcgccgctgatgaagccgtttcggtcgtacgctgcgccgatccttttatgctggcgaaggcctgctatcaccttggcaatcgccacgtgccgctacagattatgcccggcgagctgcgctatcatcacgatcacgtcctggacgatatgctgcgccagtttggcctggccgtggatttcgcgcatctgccgtttgaaccggaagccggcgcctacgccagcgaatcgcacggccatcaccaccaccatcacgatcgtgagcacagccactaaatgccgacgccggaaaaacgtctgcgcttgatgcagcttgccagcagcagcctcccggttggcggctacagctggtcccaggggctggagtgggcggtggaagcgggctgggtagcggataccgccgcctttgagcgctggcagctgcgccaaatggagcagagcttttttaccgtcgacctgccgctgtttgcccgcctctaccgggcctgcgaagcgggcgatctggcctgcgcccggcgctggaccgcttatctgctcgcctgccgggaaactcgcgagctgcgcgatgaagagcgcaaccgcggcgcggccttcacccggctgctggccgactggcagccggactgcccgcccgagtggcgcaagctgtgccagcaaagtcagctaaccggcatggcgtggctcggcgtacgctggcaaatcgccattcctgacctggccctgagccttggctatagctggattgaaagcgcggtgatggcgggcgtcaagctggtgccctttggccagcaggcggcccagcagttgattcttcgcctgtgcgaccgctacgcggcggacatggacagcgccctggcgaccccggacgacgccatcggttcggcgacgccgcttgcggctatcgcttccgcccggcacgaaacccagtattcccgattattccgttcttaggagaaggtatgaacatgattaagcaaccgctgcgcgtcggcgtcggcggcccggtcggctccggaaaaaccgcgctgctggaagccctctgcaaagccatgcgcgacacctggcagctggcggtggtgaccaacgatatctacaccaaagaagatcagcgcattctcaccgaggctggcgccctggagcctgaacgcattgtcggcgtcgaaaccggcggctgcccgcataccgctattcgggaagatgcgtcgatgaaccttgccgcggtggaagcgctgagcgagaaattcggcaatctcgatctcatatttgtggaaagcggcggcgataacctgagcgccaccttcagcccggagctggcggatctcaccatctacgtcatcgacgtggcggaaggggaaaagatcccgcgcaaaggcggaccggggatcaccaaatccgacttcctggtgatcaacaaaaccgatcttgcaccgtacgtgggcgcgtctctggaagtgatggagcgcgataccctgcgcatgcgcggcgaacgcccgtggagcttcaccaacctgaaaagcggcgacggcctgcaaaatatcatcgcctttatcgaagacaaaggcatgctcggcaagtaacccctgcaccatcccggcgcagaggtgtcgggatggtgcataccctgccctctctttagccatccccttcatgaagccctgatagcgcctgccctgcgatgtggcataaggtttgctaattccagtcatgcctaaccattaaggaatgactatgtcatcactggatataaaaactgatttacctgcgcaaaccagtgcctccggctccaaagaaacgctggaagattatacccttcgctatgctccgctgagctttcgccgctggggaccgggggttgtcgcggtgaccgcattgggcggcatcgcctatctggctgacttttctatcggcgccagcatcggcatggcctggggcaccaccaatgcgatttacgcgatcctgctggcggcgctggttatttttcttaccggtattccgctggcgattaccgccgcgcgctataacatcgacctcgacctgatcacccgcagcgccggtttcggctactttggttcggtgatcaccagcattatcttcgccggatttacctttatcttcttcgcgcttgaaggctcgatcatggcgcaggggctgctggtgggcctggggatcccgctgtggatgggctacctcatcgccacgctgatggtcttgccgctggtggtctacggcatgaaggcgctgactcgccttcaggtctggacgacgccgctgtggctggtcctgatggtggttccggtggtctggcttatcgccaaagacccggatctggtggacggctttatgaacttcgccggtaaaaacaacgcctcaacggtagatttaaccgccattatgctcggcgcgggggtgtgcctgtcgctgatcatgcagattggcgagcagatcgactacctgcgctttatgccgccgaagaccgcggaaaacagcaaaagctggtggctggcggtgttctccgccggcccgggctgggtcgtattaggcgcgattaaacagattatcggcgctttcctcggcttctatctgctgacccgcttcccggcggtgcacaacaccgaaccggtgcaacagttcgtcagcgtcttcgataacctggtccccggctggctggcgctcaccctcgcggtggtgctggtggttatctcgcagattaaaattaacgtcaccaacgcctattccggctcgctggcgtggaccagcgcctggacgcgcaccaccaaacgttatccggggcggattattttcgtcatcgtcaacctgacgattgcccttgccctgatggaaggcgatatgtttagcgctctggcgtggatcctcggcttctattctaactttgccatcgcctgggtggtggtggtcgccaccgacatcaccgtcaacaaaggggtgctgaagctggcgccggcgcagccggagtatcgccgcgggatgatctacaacgtcaacccggtaggcgtagtctcttttgccctagcggcaggcctttcgattagcgccttcttcggcctgctgggcgaaacgctggcgccgttctcgccgctgattgcgctggcggtggctttcgtgatgacgccggtcatggggatcgccacccgcgggcgctattacattaaacagcacgatgatggtattgccgagccgcgctacgatgcgcagggtaacgcgtcgatcaccgtttaccgctgcctgagctgccgggaagagtacgaacgtcctgacgtgatgcattcgcacaagcaccagggggcgatttgctcgctgtgtaagagtatggaataagtcgcgaaggcaggccgacaggacgtcggcctgtgaaatatcagacgttatgccgccggaagctcagccagcggccagcgcggacgaacggtgacaccgagctccgctttagcgccggagcgcagacggaccatccccgcataggcaatcatcgcgccgttatcggtacagaattcaggacgagcgtagaagacttcaccaccgcgctttttcatcatttccgccagcttcgcgcgcagcgtacggttagcgctgacgccccccgccatcaccagccgtttaaagccggtttgatccagcgcgcggcggcacttaatcatcagcgtatccacgaccgcatcttcgaaagcgcgggcgatatcggcgcgggtttgatcgtcatcgccgttgctgcgaatggtgttcgcggcaaaggtcttgaggccagaaaagctgaaatccagcccggggcggtcggtcatcgggcgcgggaagacaaagcgcccttcggtgccctgggaggccatcttcgacagcatcgggccgccgggataatccagccccagcagtttcgctgtcttatcgaaggcttcgcccgccgcgtcgtcaatcgattcgcccagcagttcatactggccaatgccggtgacgccgatcagctgggtatggccgccggaaaccagcagcgcgacaaaaggatactgcggcggattatcttccagcatcggcgccagcagatgcccttccatatggtgtaccgggatcgccggcacgttccaggcgaacgccagcgaacggccaaccgttgcgccgaccagcagcgcgcccaccaggccggggcccgccgtatacgcaacggcatcgatatcctttgccgtcagcccggcttccttgagcgccgcctgaatcagggggacggttttacgtacgtggtcgcgcgaggccagctcgggcaccacgccgccgtagtcagcgtgcaatttcacctgactatacagctggttggctaacagacctttttcgtcgtcataaatggcgatgccggtttcatcgcaggatgtttcaattcccagtacacgcatggctagttttacctcgtttcaataccgcgcagtgtaggaccaatgcgggttgatgtataccctaagaatttcaggtcgcgggaaggcggcgacgcagcgcatcccccggagcgtacggaaagtacgtgactggggtaagcgagaaaagccaacgctcctgcgggctgaaagacgacgggtataaaactttcctcacccctggcgttcacttcgtgtatactccctgtccttataaaagtccctttcaaaaatcgcgtcggtgctttacaaagcagcagcaattgcagtaaaattccgcaccattttgaaatatgctggcgctgatgccagcggcaaaccgaatttatcaaaggtgagagttacatgccggtaattaaagtacgtgaaaacgagccgttcgacgtagcgctgcgtcgcttcaaacgttcatgcgaaaaagcaggtgttctggcggaagttcgtcgtcgtgagttctatgaaaaaccgactaccgaacgtaaacgcgctaaagcttccgcagtgaaacgtcacgcgaagaaactggctcgcgaaaacgcacgccgcactcgtctgtactaatctgttgggagccacgctctcaattcagaccgagttgtagttgtaaggccgtgcttccgaaaggaatgcgcggcttattttcgtttatgcattagcatatacacccaatcattcaagatgcatcaaggcggcaagggagtgagtccccggagcttaccgaagtaagtgacaggggtgaacgagcgaagccagcgcagaggcagcttgaagggtaacgtgtataaaacggggcatatggctggacgaattccacgagtatttatcaatgacctgctggcgcgcaccgatatcgtcgatctgatcgatgcccgggtaaagctgaaaaagcagggcaaaaattttcacgcgtgctgtccgttccataacgaaaaaaccccctctttcaccgtcaacggtgaaaaacagttttaccactgcttcggctgcggtgcgcacggcaacgctatcgacttcctgatgaactacgacaagctcgagttcgtggaaaccgttgaagagctggctgccatgcataatctagacgtgccgtatgaagcaggtagcggacccagccagattgagcgccatcagcggcaaaatctctatcagctgatggatggtctgaacacgttttatcaacagtctctgatgcaacccgccgccggccccgcgcgccagtatctggaaaaacgcggcttaagcagcgaggtgattacgcgcttcgcgattggctacgcccctcccggttgggacaacgttttaaaacgttttggcggtaatcaagaaaaccgccagtcgctgattgatgcgggcatgctggtcactaacgatcaggggcgcagttacgaccgcttccgcgaacgggtgatgttccccatccgcgataagcgaggccgggtgattggttttggtggtcgcgtgctgggtgacgccatgccgaagtacctgaactccccggagaccgatattttccataaaggccgccagctgtacggtctttatgaagcgcagcaggataacgctgaaccgccccgcctgctggtggtcgaaggttatatggacgtggtggctctggcgcagttcggcattaactatgccgttgcatcgctggggacgtcgacgaccgctgaccatattcagctgttgttccgggtcaccaatcaggtggtttgctgctacgacggagaccgggccggccgcgatgccgcctggcgcgcgctggaaacggcgctgccgtatatgaccgacgggcgccagctgcgctttatgtttctgccggatggcgaagacccggatacgctggtgcgcaaagaagggaaagccgcatttgaagcgcggatggagcaggctcagccgctctccacgtttttgttcaacagcctgctaccgcaggtggatttgagcaccccggacggccgcgcgcagctgagtaccttagcgctgccgctgataacccaggtgccgggtgaaacgctgcgcatttacctgcgccaggagttaggcaataagctggggattttagatgatgcgcagcttgaacgtttaatgccaaaacagtctgaaaatggcatccagcgccctgctccgcagctaaaacgcacgaccatgcgtatactgatagggttactggtacaaaacccggatctggcgccgctggtaccgcccctggaagggctggacccgcgtaaaatgccggggcttgggctgttcaacgaactggttaaaacctgtttggcacagccgggcctgaccaccgggctgctgttagagcagtatcgcggcacaaatgaggccgcaacccttgaaaaactgtcgatgtgggacgatatagcagataaggatattgctgaaaaaaccttcaccgactcgctcaaccatatgtttgattcactgctggagctgcggcaagaagagttgatagctcgcgaccgcacgcacggcttaagcagtgaagagcgccgggaactctggaccatcagccaggaactggccaaaaaataaacgaaagacgaactcattcaagttgtatcaaagcagcaagagaacgaatccccgggagtgcgcacaagcacatgaccaggatgagagaacgtagctaacgcagagacaacttgaaagataacgcattgaacggcttaagtgccgaatatcgttcgggaagaccccgacagccgctcgaggcgcagcggcaataatataagtacgccctcgctttaaatgttggcagttcgcctgcttacaccaatcaaacgaattaagtgtggataccgtcttatggagcaaaacccgcagtcacagctgaagcttcttgtccaacgtggtaaggagcaaggctatctgacctatgccgaggtcaatgaccatctgccggaagatatcgtcgactccgaccagatcgaagacatcatccaaatgatcaacgacatgggcattcaggtgatggaagaagcaccggatgccgatgatcttttgcttgctgaaacgaacaacaatactgacgaagatgcggaagaagctgcggcgcaggttctctccagcgttgagtctgaaatcggacgcacaaccgacccggtgcgcatgtacatgcgtgaaatgggtaccgtcgaactgctgacgcgcgaaggcgaaatcgacatcgctaaacgtatcgaagacggtattaaccaggttcagtgctcggtggctgaataccctgaagcgatcacctatctgctggagcagtacgatcgcgttgaagcggaagaagcgcgtctgtccgatctgatcaccggttttgtcgacccgaacgccgaagaagatatggcgccaacggcgacgcacgtcggttctgaactctctcaggaagagatggatgacgacgaagacgaagatgaagaagaagacgacgacagcagcgatgacgacaacagcatcgaccccgagctggcgcgcgagaaattcgccgagctgcgtacgcagtacgaactgacccgcgacaccatcaaagcgaaaggtcgtagccacgccgcagcgcaggaagagatcctcaagctgtccgaagtgttcaaacagttccgtctggtaccgaagcagttcgattacctggttaacagcatgcgtatcatgatggatcgcgttcgtactcaagaacgtatcatcatgaagctgtgcgttgagcagtgcaaaatgccgaagaaaaacttcatcactctgttcaccggcaacgaaaccagcgaaacctggttcaatgcggccatcgccatgaacaagccgtggtcagagaagctgcttgacgtgaaagaagacgttcagcgcggcctgatgaaactgcagcagattgaacaagagaccggcctgaccatcgagcaggtaaaagatatcaaccgtcgtatgtccatcggtgaagcgaaagcgcgccgtgcgaagaaagagatggttgaagcgaacctgcgtctggttatctcgatcgccaagaaatacaccaaccgcggtctgcagttcctcgatctgatccaggaaggcaacatcggtctgatgaaggcggttgataagtttgaataccgccgcggctacaagttctccacctacgcaacctggtggatccgtcaggcgatcacccgctctatcgcagaccaggcgcgcaccatccgtattccggtgcatatgattgagactatcaacaagctcaaccgtatttcccgccagatgctgcaggagatgggccgcgagccgacgccggaagagctggccgaacgcatgctgatgccggaagacaaaattcgtaaggtgctgaaaatcgccaaagagcctatctccatggaaacgccgattggcgacgatgaagattcgcatctgggagatttcatcgaggataacaccctcgagctgccgctggactctgccaccaccgagagcctgcgcgccgccacccacgacgttctggctggcctgaccgcccgtgaagcgaaagtcctgcgtatgcgctttggtatcgacatgaataccgatcacacgctggaagaagtgggtaaacagtttgacgtaacccgcgaacgtattcgtcagatcgaagcgaaggcgctgcgtaaactgcgccatccgagccgttctgaagtgctgcgtagcttcctcgacgattaattatcgccgcgtcccctgaaaagccagtcacatgactggctttttttatgcctaagcagaaaccatttatttaataaatattaaaaccccaatataaaacccatcaatatatatccaggtcttattcttattatttatttatgtgccattaaaccgctggactcatagttttacgattgtactattggttggttgatggagcgtatttacgcctaaaaccgcaggcaaatcatagggaaatgaaatgaatagcaagcgtaaaattcagctggctgattttaatagaacggttattttaaccaccgctaatacattatttctaagccgtggaatagaaagtaccaccatggatgagatcgcacatgaagccggttttagtaaaaccacgctttatacctatttcgacaataaaaaggatattctggatcatcttatcctggaggtaatggcgcgtttctatcaggagctcataccaatcgccaataggcaaaattcatttcgcgaattttatcgcgagctgtgccatgcgctgatggctctccacgaaacaagccttgcctacttttccgcgatagccgggaagatcgcctgttctgaaaaaatcactaaaaacaataaagcgttgaaaaatatcgctatgactggagaacagatccaccagattatcgcaaagcgaatcacagacgccgccgaaaaaaaagagattggattaagtgctcccgtcgcggacgtcatgatgctgttctggctctgcctgaccgggctagtggaaaagtcctcgtacagagaagaatgtcttttacgtcgccttgagaaagaccgtaaagcctttctcgacttcgcttttgacgccctcttattcatgatagaaaaagggaatattagcgattgcgaaaaagctgactaaagcctcaggcttaagccagccgccgacgaccggggtgaaagccgtaacccctttgtcgtcggaaatgcattaaagccctcgcgtggccagcgcctcgtcaagctcccggtaggcctccaccagtttatccagcgtcgcccggttgaggccactgggattcggcagcacccacacttccgtcgccccaatggtcacctgctgcttgccccattttacgccgcgcacctgaaacgctttctcgaaggcctgtttacccaggatcgccagcgcgcgcggctgatactcttccatttttctgaccagttcacggccaccatcgcggagctccagcagctcaacctcgctggcctgcaccgtcgggcgttcgacgagcatcgtgatcccgcagcgggtatccagcagctggagttcctcctcgggtttcagaagacggtcggtaaagccggcctggtgaatcactttccagaagcgattgcccggatgggcgaaatgaaaaccggtatgggcggaagacttccccggattgataccgcaaaagaccacccgcaggtccggcgccagaatatcgttgatcatgttttccccagctcaatgcctaaaaggtaattataaaggattgaaaatgcgttgtttataaaaacagcaggcgtgatttttaggctggattgcggggaacagttactttataatccctcgccacggccccttagctcagtggttagagcaggcgactcataatcgcttggtcgctggttcaagtccagcaggggccaccagatacagcagggctgacgaaaaatcgtcagcccttttgcattgtgcggccccctcggggcgccgcagcttaacgtgaggttcgcgacaggcggcttacaccagcgcctgcagctgttcgcgcatatagacggtgaagaattccgggtttttaatgacgatccggttaccggaggcaattttttccgcccagccggccactttttccgtgaacccggcatcccatccctccttttcaccccgggccatgacgtcggcaggatttgccggtacgcccagttcatgcaaatacttcaaaattcccttagcggtactttcatccatagtattcggcaccgacaacgatgtgttcataccaccaataaaatccagggctttatcgattgctgttggcatactcttatccttaaaattaaccacgtaatgaacatgatgacactatggacccatcttcgccgggatatcaaagagatcgttgcctttctttgattcagaccgcagctaaacgcttgcgtggtgcttttctgctcgactatttcgtaccattcctcacaggaaactactccatacgtccgcgcttaaactggccggcatcgatatcgtactgtttcatttttcgccacagcgtggtgcggccaatattcagcagctgcgccatctcctgcacccgtccgctggtcacccgggcggcatggataatcgcttctttctcaatggcgctaaaggtcaggctggcgggcagcagcgaggagcccgcgtcggcgccgggccgctcggcaaacagatattccggcaaattactcagccggatatggccgttatcgctgctaatggcgatattttcaatcacgctgttcagctcaaaatcgttgcccggccaggagtaggccaccagctgcgccagcgcatcgtcatccattttcagccgcgaggaaaagcgcttttccaggctcttaaggcgattgtgcaccagcgaaggaatactgttacgccgcgcgcgcagcggtgggataacgatttcaaaggagtgcagcgcgtagtaaagctggcggctaaagcggttttgctccaccagattggcaagatcgacggtggtggtggcgatcactttaacgtctaccggaatcaagcggcgggcatccagacgggttaaaaccccctgcttgatcacctgcagcagcgcggactgcagctccggcgccaggtattcgattttttccagaaacagcgtcccgccgttggccagctcaagacggctaaggcggccgttttcatcgtccgtcggcgcgctgcccataaaatcctggcccaggacgctgtcggcatacagctgacagttgaccgcgatatacggcccgccgccccgctcgctctcattgtgaatcgcctggctgagcaactccttacccaccccctcttcaccgcacagcagcaccgggaaagcgccgcgcgccgcctggcggccaaagtgaatcagccgccgggtttccgggtcgtccgccgacatctgttcaaaggtatggctcactttgccaagctggctggtcatcagctggcgcatctgctcgaccggatgcagcagcagaatgaaactgttgccctgctcttcaacgattggcttgagcgtaatcacggcgtcgacaaactgatgctggctttcgaaggtgacctccacatggttcagcccgcgcgcgtgcttaatggcacgacgcagcagggccggcagcgtcaccagttcattgatgtttttcccctggctggcctgggcatcaaggtgcagcagcgtcgcggcctgcacgttcagaaactgcaaaatcccctgctcgttccacgccatcaccccgtcatccatgctctccagcagaccgtacatctggttaagatggcgattcgactcggccagcaggctatcagtgagcagcgagttgccgacttcccgggcgatagccagggtcagggagaggtcaggcgaagcctgttcttccgtcagacagcacagggaaatggaaccgaacagacgcccgtggttatcaaacaccggcgtggagctaaacgaccatccgtgcagcgcatgtttaaaatgctcctcgcccgtcgttttgactggctgcccgagcatggaggccagcgaaagcgcgcagctgccgataatgctttccgcgcagtagctgccgtcacgaaatcccagcgccgccagctggtcgagggtctgcggatcgccgcagcggctaagaatacaggcggactcatcgaggatgaacagcgcgcaggggcggttatccataaactcccaggcatcctccagcgccgcctgaccaatcgtcaacagcgcggtcttgcgccgacaaatcgattcaaacgtcagcccctgcgcctgatgcggcgtctgccaggtttcccgctgcataaacttgctgcagcgatgccacgactgggttatcaccaaaggaaagctctgagtctgcgcagtcatatccctatccgctgtttcataaacgacaacccctccggcggctaccgccagagggggagaaaacgtctcatcgctaaaatgagacggggcagatcgacgctaaattagcgcgccagccactgctgtccgagcaggtcggcggtcagaatcgccgcatgcacgctctgcgcgctgaccgggaacggcatgttatgaatggtttcaccttccgcgcaggtcgctttggcgactgcctgaattttctcatcgatgccctctttaacgcccatttgcgccagcgtaaccggcagcccgacggtatggcagaagttcagcaccgtttcgatctcttccatcgggctattttgcagcaccagctgcgccagggtaccaaacgccactttctcaccatggtacagatggtggcactcttcgaggatggtgaaaccgttgtgaatggcgtgcgcggcggccagaccgctactttcaaagccgataccgctgaggtaggtattcgcttcaacgatacgttccagcgcatcggtcaccacgccggcctgggcggcgaggcgggctttttcgccttccgccagcagcgtatcatagcacaggcgcgccaggctcagcgccgctgccgtcgactgaccgcccgccatgctggtggctctggcgtcatagcaggccctggcttcaaaccaggttgaaagcgcatcccccatcccggctaccagcaggcgcaccggcgctttagcgataatcgccgtatccatcaccaccatgtccgggtttttcgggtagatcagatactcttcaaattcgccggcttcggtgtagataaccgacagcgcgctggttggcgcatcggtggaagcgatcgtcgggatcaccaccaccggtagcttctggtagtagccaatggctttcgccgtatcgagcgtcttgccgccgccgatgcccaccacgccgcggcagccgtgctgtttcagaatggcgatcaggcgattgatctcaacgtggctgcattcgccgttgaagcgctccgcatggcagctgatattatggctgtgcaaaccttccagcactttctctcccgccagcttcatcacgaagtcatcggcaatcacgaaaaagctgtccgccaggtttttggcgtattgcccaaacagcgtggatgcatctggtccctggagatatttggctggagattgaataacttttagcattccgttcaccctcaaataagtgcatgttttgacatgatgagccccggtgtttctccgtccggccttacatcaaaggcggggacgaaagcgctacctgagcgatgccatcactgtagggcgagccgcgggcaaaaaaatctttcccctttttgtcccgatatgaaacaggacataaattttattgtttcatattgaaacatgaattcatgtgaaacgatgggattgcgatctcgatccgcccctttggcgcaaaagaaggtcaccaaccggacgatcgtcgacgtttttcaccaccacgggcggcaagaaggggcaaaattatttctctgagcgggctttccacgctgatgaagcgaggtgaaagaggcgccttacttcgcatttttccctttccttgcgcaaaaatgtttcattaaggaacaaaaattaataattacgtttcgtaatgaaactcattttatggcgattttttttcccgccaactcagccagaatcaatacatcgcccgatatcgcatatcgtcaggcggtacccctacacgatgaccgcctccgtcagcagagaggccgcatcgaaactccgacggagcataaacaatgaaaaaactgattaaccgtgtcgaagatgtcctgagtgaacaactggctggcctggcaaaagcccaccctgaactgacgctacaccaggatccggtctacgtcacccgcgccgatgcgccggtggccgggaaagtggcgctgctctccggcggcggcagcggccacgagccgatgcactgcggctatattggccagggcatgctttccggggcctgcccgggagaaattttcacctccccgacgccggataaaatgtttgagtgcgccatgaccatcgacggcggcgaaggcgtgctgctgattatcaaaaactacaccggcgatattcttaacttcgaaaccgccaccgagttgctgcacgaaagcggcgtcaaggttaccaccgtggtagtcgatgacgacgtggcggtgaaggacagcctctataccgccgggcggcgcggcgtggcgaataccgtgctgattgaaaaactggtgggcgcggccgccgaacgcggcgactcgctggaagcctgcgccgaactggggcgcaagctcaacaacctcggccactctatcggcatcgcgctcggcgcctgcaccgttccggccgccgggcaaccctcattcgaactgcaggacgatgagatggagttcggcgtcggcattcacggcgaaccgggcatcgaccgccgccgcttcacctctctcgatcgcaccgttgacgaaatgttcgataccctgctggaaaacggcgcctatagccgcacgctgcgccactgggacaacgtgaaaggcgcgtggcaggaggtcacgcagaccaagcaggcgctgcaaaaaggcgatcgggttatcgcgctggtcaacaacctcggcgccacgccgctgtccgaactctacggcgtctataaccgtctgacgcagcgctgcgaggaggccggtatcgttatcgcgcgcaaccttatcggcagctactgtacctctctggatatggtgggcttttccatcaccctgctaaaggccgatgaagagacgctggcattatgggacgccccggtccacaccccggcgctgaactggggcaaataaggagcaacgacatgtcattaagcagaacgcaaatcgtagactggctctatcgctgcggcgatatcttcaccaaagagagcgattttttgaccggtctggaccgggaaatcggcgatgccgaccacggcctgaatatgcatcgcggttttagcaaggtggtagaaaagctgccgtcgattgccgataaagacattggttttattcttaaaaataccggtatgacgctgctctccaacgtcggcggggccagcggcccgctgttcggcaccttctttattcgcgccgctcaggtgacccaggcccaccagagcctgaccctggaggagctctatcagacctttcgcgaaggcgcggaaggggtggtgaatcgcggcaaagccgagcctggcgataaaaccatgtgcgacgtctggctgccggtggtggaatcgttgcgccagtccagcgaacagcacctgtcgataccaggcgcccttgatgctgcctgcgaacaggcgcaagccgccgtccacgccacaatcgccatgcaggctcgcaaagggcgggccagctacctgggcgaacgcagcatcgggcaccaggatccgggcgcgacctcggtgatgttgatggttcagatgctggccgcagcggccaaagagtaaggaaaacgcgatggtaaacctggttattgtttctcatagcgcccgtctgggcgaaggtgtcggagaactggcccggcagatgttaatgaacgatggctgtaagctggcgatcgccgccggaattgacgatcccgccagtccgatcggcaccgatcccattaaggttatggaagctatcgagtccgtcgccgacgccgatcatatcctggtgatgatggatatcggcagcgccctgctgagcgccgaaaccgcgctggatctcctcgatccggccattgcggctaaggttcgcctgtgcgcggcgccgctggtagaagggactctggcggcgacggtgagcgccgccgccggagccggcatcgacaaggtgatcgaagacgccatgaacgcgctggaggcaaaacgcgtacagctggggttaccatcgcaaccgcaacacgcttcgctgaccgccgcgccggtcgacgaccgcgacgcgcgctcggtttccgtggtgattcaaaaccacaacggactgcacgttcgcccggcgtcaaagctggtcgccgcgctggcgggattcaatgccgacctggtgctggagaaagggggtaaatgcgtcacgccggacagcctcaaccaaatcgccctgcttcaggtgcgccgaaacgataccttaaggctgcttgcccgcggcccggacgccgacgccgcgctggcggcgttccaggcgctggcggcggagaacttcggcgagccaacggaggcggcgcccgcgcgtcggcccgccagcgccgaccgcgttgagggtaaggtcgtgctttatccccagccgcaggacaggatctcgcgggaaacgagcgccgccatcggccagcagcagctgcggctgaaacgggccatcgaccggacgctggaagaccttagcgcgctgacgactctggcagaggcgacgttttccgccgacatcgcggcgatcttctccgggcatcataccctgctcgatgaccctgatttatacgcagcggcgtgcgacatcatacgcgacgagcagtgcagcgcggcgtgggcctggcaacaggtgctgagcgatttaagccaacaatatcgccatctcgacgatgcttacctgcaggcgcgctatattgatattgaagatattttgcaccgcacgctgcgtcaccttaacgagcgcaatgaagcgctgccgcagtttagcgcgccttcgatcctcgttgccgacgatatcttcccttctaccgtcctgcagcttaacgcagagcaggtgaaggggatctgcctgcaggccggcagcgagctctctcacggcgccattatcgcccgccaggcaggtattgcgatgctgtgccagcagagcgatgccctgacgctgcaagatggcgagaacgtcatccttgatattcccggcaaacgcgtgattcgcggctaacctgccctaacctttccgccccggaggctgtcccctccgggaactcgcttaactttcaggatccgttatgtctcaattcttttttaatcagcgcgccaacctcgtcaacgaagtgattgaagggaccattatcgccagcccgtggaacaacctggcgcggctggagagcgatcccgccattcgcgtggtggtgcgtcgcgatctcgacaaaaacaacgtggcggtaatctccggcggcggttccggtcacgaaccggcccacgcgggctttgtcggtaaaggcatgctgaccgccgccgtctgcggcgatctgtttgcctcgccgagcgtcgatgcggtgctgaccgccatccaggccgtgaccggcgatgccggatgcctgctgatcgtcaagaactacaccggcgatcgtctgaacttcggcctcgccgcggagaaagcgcgccgtatgggctataacgtcgagatgctgatcgttggcgatgatatttcactgccggataacaaacatccgcgcggcattgccgggacgattctggtgcataaagtggccggctacttcgccgaacgcggccacaatctggcaaccgtgctgcgcgaagcgcagtatgccgccagacacaccttcagcctcggcctggccctttccagttgtcatctgccgcaggatgcggaaacgactccgcgccatcatccggaccaggccgagctggggatggggatccacggcgaaccgggcgcttcggttatcgctacgcagaacagcgcggaaatcgttacgctgatggtagagaagctcagcgccgccctgccggaaaccggccgcctggcggtgatgatcaataatctcggcggcgtgtcgattgccgaaatggcgattttgacccgcgagctggccaatactgcgctgcatcagcgtatcgactggctgataggtccggcgtcgctggtcaccgcgctggatatgaaaggcttctccctcaccgccatcgtgctggaagagagcattgagaaggcgctgctttccgcggtagaaaccgccggctggcagacgccggtacagccgcgcgcggtcagcgtgatgccatcatcgctgcgcagtacgcgggtggagtttgcgccctcggagaacagcgaagttgcgggctacgtggaacgggtgaccggcacgctgtccgggctggaagcagaccttaacgcgctggatgcgaaagtcggcgacggcgataccggctccaccttcgccgccggcgcgcgcgacatcgccgacttacttcagcgtcgtcagctgccgctggctaacctcgccacgctgtttgccctgattggcgagcgtctgacggttgtgatgggcggctccagcggcgtgctgatgtcgatttctttaccgccgccgggcagaagctggaacagggggcaagcgtcgccgaagcattaaacgccggtctggcgcagatgaagttttacggcggtgcggatgaaggcgaccggaccatgattgacgccctgcagccggcgctcacggcgctgctggccgaaccggataacctgcaggcggctttcgccgcggcccaggcgggcgcggatcgtacgcttcacgccagcaaagcgggcgccgggcgcgcatcgtatctgaacagcgatagcctgcgcggcaatatggaccccggcgcccacgcggtggccatggtatttaaagcgctggcgcagaaatagtctcccctgctcgcgctgcgcttagcagggctacaggtcaccctcgtctgcgggctagtcgcccggacagatgcgcagcatcgcctccgggaaaatcagccactctgcgcgctgctcccgggggcggcgcttaacgcgccttgcccgggctacgagttccccctcgtctgcggaccggtcgcccgggcagatgcgcagcatcgcctccggaaaattcagctactctgcgcgctgctcccgggggcggcccttaacgcgccttgcccgggctacgggttcaccaccacctgcgggtctggtagcccggacagatgcgcagcatcgcctccgggaaaatcggccactctgcgctctgctcccgggggcggcgcttaacgcgccttgcccgggctacgggttccccctcgtctgcggaccggtcgcccgggcagatgcgcagcatcgcctccgggaaattcagctactctgcgctctgctcccgggggcggcgcttaacgcgccttgcccgggctacgggttccccctcgtctgcggaccggtcgcccgggcagatgcacagcatcgcctccggaaaattcagctactctgcgctctgctcccgggggcggcgcttaacgcgccttgcccgggctgcgggttaacagccgtctgcggtccggtagcccgggtaaggcgccagccgcaacccggggtttctccgcgcttatttgctgtgccagtaggcctgcgaacgcaccagctgcggatcaatctccgggccttcaaagcgcgccagcagcgatttcaccaccgccccttccccggtcagccagataaaataatcctcagccggcaccgctattcgcgccaggcgctcggccgcggcagtggagtgatgtcccaccacccactcgatatgaaaaccatcgagatcggccaggtaatcttgataagactcatcgccaatggtgacgatcgccgtgacctgcgggcgcgtcggaagctgctgcaatcccagcagacggcggcgcagcgcgggcatgcctgactcatcggtcacatacagctgccaggcgtaatcttccggcaccaccagcgaaccgcgcggcccgccgatcaccagcttatcgcccgttttcgccgccagcgcccagctgctggcaataccgtcatcgtgaataaaaaagtcgtacgccagctcatgacgcccggcgtcgtacagcggcgtatagtcgcgggtcgccggacgcacgccatcgccccagttaatgccttcatccgtcacctccggcggcgtgaacgcagcgcccgcggccgggaaaaagagcttggtgtggtcgtcaaaaccctgggaaacaaagccttccagcgcctctccgcccagcacgacacgctggaatgcgctgccgatacgctcgacgcgcaatacggttaactcacggaagcgcagttcattacgtacgcgctgcgggtatttggggtgtctggtcgttgtcatctttcatagccttcgtgaacggaatagatatatctaaaaatattgcaaatgataatgattgccattaaaaaagaatgcaagcgttttttgatatagtcatagaaaaacgccacaaaagccaaaatcaaaaattaaaacgttaaatatcaattaaataaaaaatacattcactactttgttgctactttattatttttagatataaattagatatatcaaataatcacaggagcaaaacatgagacaccatcacgaagaaggccgtggcccacgcggacgccacggggaacatagcgaacacggcgagcacggtcgcagaggcggcggacgccggcagcgcttctttggtcacggcgagctgcgcctggtgattctggacatcctcacccgcaatgccagccacggttacgaactgattaaagagatcgaaaccctgacccagggcaactacagcccgagccccggcgtcatctacccgacgctcgatttacttcaggatcagggattaatcagcgtggctgacgaaaacggccgcaaaaaaatcgccattaccgccgaaggcagtcagctgcacgcggaaaacctggagcagctggagcatattcagaccaggctgcaggcgcgcatggtgggctgtgaactccgtaaaaatccgcagatgaagcgcgcgctggagaattttaaggcggtactggatttaagggttaaccagcaggaaataaccgaagctcagctaaagcagatcgtcggcgtcattgaccgcgcggcaatggaaatctcccagctcgactagccctctgctccatcgccgggcagcctgcaccgccgcgaagcacgcggcgggaccccttctgcgcatggtttcacgccttcaggagtaaaacatgccaataatttcgcgataagattaaattttgctcaaccgcaatttcacgttgcgtttatcccgattttcctggcccgcgccgaagtggcgtaatccctgcaatacttaattcagtatcatgtgatacgccccgcccaggagcatattttgaacaggttaccttccagcgcatcggctctggcctgcagcgcacacgcactgaatctcattgagaagcgaacgctcgatcatgaggagatgaaatcacttaaccaggaggtcagggaatactttaaagagcatgtgaacccggggtttttagcgtatcgaaaatcggtcactgctggcggggattacggagccgtagagtggcaagcgggagggttaaatacgcttgtcgacactcagggacaggagtttatcgactgcctgggtgggtttgggatttttaatgtagggcaccgtaatccagttgtcgtttccgccgtcgaaaatcagctcgctaaacaaccccttcatagtcaggaactgctggacccgctgcgggccatgctggctaaaaccctggcggccttaacgccgggcaaactgaaatacagcttctttagcaacagcggtaccgaatcggtcgaagcggcgttaaagctggcgaaggcttatcagtctccgcgcggcaagtttaccttcgtcgccaccagcggcgcgtttcacggtaagtcgctgggcgcgctttcggccaccgcgaaatcgactttccgtaagccttttatgccgctgctgccgggattccgtcacgtgccttttggcgatatcaacgcgatgcgcaccctgctgagcgagtgcaaaaagaccggtgatgacgtcgcggcggtgatccttgagcctattcagggcgaaggcggggtgattctgccgccgccgggctatctgcccgcggtgcgcaagctgtgcgacgagtttggcgcgctgctgatcctcgatgaagtgcaaaccggcatggggcgcaccggcaagatgttcgcctgcgagcatgaaaacgtccagccggacattctgtgccttgccaaagcgctgggcggcggcgtcatgccgattggcgcaacggtcgccaccgaagaggtattctcggtgctgttcgataacccgttcctgcataccaccacgttcggcggcaacccgctggcctgcgcggcggcgctggcgaccatcaatgtgctgctgacgcaaaacctgcccgcgcaggcggagcagaaaggcgacatgctgctggacggcttccgccagctggcccgcgaatatccggatctggtgaatgacgtgcgcggcaaaggtatgctgatggccattgagtttgtcgataacgaaatcggctatgactttgccagcgagatgttccgccagcgcgtactggtggccggaacgctcaacaacgcaaggacgatccgcattgaaccgccgctgacgctgacccctgagcagtgtgaacaggtgctaaaagcggcccgcctggcgctggcggcgctgcgggtttcggtggaagaggcgtagtgacctgccctctccctcacagggagagggcattgcgttataccacccgcacgccagcaggcatcgccctttccggcgtaagcagtacgctttcgctgccatcgtcggtttcggcgcaaagcagcatgcactccgaggtttcaccgcgcattttggctttcgccagattacacaggaccacgaccgtttttcccagcaactcttcttcgctgtagtacggcacgaggctggttaccgtctgcagcgtgcgatcgccaacatcaatccgggcaatatagagcttgtcggcattctcatgtcgttttatcgccacaatttttcccgtacgcatttccagtctggcaaaatcagcataaagcaccgtttccatcttgcacctctcaagtaaaattttagtaaaagataacaaatgtcggcgaggtttccgcataatagtgcgaagaatgttagattcatcactcttttgcgcgctggaaacgctgcggtggggatgaataatacggcggaaatttactgaaaagagatgcagctgcccgcgcttgctttacaatggtttgcgtcgatggggcaacgtcagataaggaaaacaatggccacactaaaagatatcgcgaccgaagcaggcgtttcactggcgacggtttcccgcgttttaaacgacgaccccactctgaacgtgaaagaagagacaaaacatcgcattcttgaggtggcggaaaagctggaatataaaagtaccagctcgcgtaaggctcaggttcacaccgtcggccaccaccatattctggccatctacagctaccagcaggatctggaaatcaacgatccttactatctggcgatccgccacggcatcgaaacgcaatgcgaaaagctcggtatcgagttgaccaactgctactttaacaacgcgctacccgagctgaaaaaagtgaccggcgttctgattgtcggccagccttcgcgggcaattcgcgacgccgccacggcgttaaccgacaacgtctgctttattgatttccatgaacccggcagcggctatgacgccgtcgacatcgatctggtgcgtatcgccaaagaagttatcgacttttttatcgcccagggcgcgcggcgcatcggctttattggtggccaggatgagccgggtaaagccgacatccgcgaagtggccttcgtcgaatatggccgcctgaagggagtggtttcggaagaagatatctggcgcggcgggttttccagttcctccggctatgagctggcaaaaacgatgctggcaaaggcggatttccccaccgcgctgttcgtcgcatcagactctatcgccatcggcgtgctgcgcgccattcatgaacgcggtctctcgatcccggaagatatttcgctcattagcgttaacgatatccccaccgcgcgttttacctttccgccgctctccacggtgcgcattcattcagaaatgatgggcagccagggcgtcaacctgctggttgagaaagcccgcgatggccgcgcgctgccgctaaacgtctttgtccccagcgtgctgaagctgcgcggcaccacccgctaatcccgtttctgacgctaaatcctctgcgcccggcccccgggggcggcgcttatcgcgccttgcccgggctacgggttcaccgccgcctgccaaacagtagcccggacagatgcgccagcatcgcctccgggaaattccgcctctctgcgcccggctcccgggggcggcgcttgacgcgccttgcccgggctacgggttcaccgccgtctgccaaacggtagcccggacagatgcgccagcatcgcctccgggaaatccccctctctgcgcccggctcccgggggcggcgcttgacgcgccttgcccgggctacgggttcaccgccgtctgccaaacggtagcccggacagatgcgccagcatcgcctccgggaaactccacctctctgcgctctgctcccgggggcggcgcttgacgcgccttgcccgggctacgggttcaccgccgtctgcaggccggtagcccggacagatgcgcagcatcgcctccgggaatgtccccttcccgacgccaaccgcaggcgcccggtaacgctcattttgtgatcgagttaaagtaaatcgctcccggtgattttatttagtaaaagttttactaaaataacctctatccgtttagtccgttcagggaggcgatatgaatcgctgggaaaatcttaaactcactcatgaaaaccggctgcctccgcgcgcctatttcttctcttacgattcgctggcccaggcgcgaaccttcgcccgtgaaaccagcagccgctttttgtcccttagcggacagtggaacttctgcttctttaacaacccgctgcgggtgccggaagcgttcacctcgcaatacatgagcgactgggggccgattaccgtaccgggaatgtggcagatggaaggccacggccagctacagtacaccgacgaaggctttcctttcccgattgacgttccctacgtgccgaccgacaaccctaccggcgcctatcagcgcatctttaccctcagcgagggctggcagggccagcagaccctgattaaatttgatggcgtcgaaacctattttgaagtgtacgttaacggtcagtacatcggtttcagcaaaggcagccgcctgacggcggagtttgatattagtcacgcggtaaaaatcggcgacaacctgctttgcgtgcgcgtcatgcagtgggcggactccacctatatagaagatcaggatatgtggtggtcggcgggtatcttccgcgacgtgtatctgatgggcaaaaacccgcttcacgtccaggacttcactttgcgcaccgattttaacgatgactacgtcgacgccacgctctcctgccagctggtgctggaaaatctcgccgcgcagccggacgcagcgacgctggaatacgcgctgttcgacggcgaaaaggtgctgtatgaaggcgcaacgccgcgcctgagcgtcagccagctgctgaacgtcgactttgcgatcgacgtgaaggcgccgcagcagtggtcggcggaaaatccctggctctatcacctggtgatgacgctgaaaaacgccgccggggagattatcgaagtcattccgcagcgcgtcggttttcgcgatatcaaagtgcgcaacggcctgttctatatcaataaccgctacgtgatgctgcacggcgttaaccgtcacgacaacgaccatctgaagggccgcgccgtagggatggatcgcgttgagaaagatctgctgctgatgaagcagcacaatatcaactcggtacgtaccgcccactaccccaacgacccgcgtttctatgagatgtgcgacatttacggcctgttcgtgatggcggaaaccgatgtcgaatcccacggcttcgccaacgtcggcaacctgagcgccatcaccgatgacccggcatgggagcatatttacgttgagcggatcgtgcgccacgtccacgcgcagaaaaaccatccgtcgatcgtcatctggtcgctgggcaacgagtccggctacggctgcaacattcgcgcgatgtatcacgccgctaaggcgatcgatgatacccggctggtgcattacgaagaggatcgcgacgcggaggtggtggatatcatctccaccatgtatacccgcgtaccgctgatgaacgaatttggggaatatccgcatgccaagccgcggattatctgcgaatacgcccatgcgatgggcaacggtccaggcgggctgagcgaataccagaacgtgttctatcagcatgacagtattcagggccactacgtatgggagtggtgcgatcacggaatccaggccaccgacgacagcggcgcggtatggtacaaattcggcggcgactacggcgactatcccaataactacaacttctgcctcgacgggctgattttctccgaccagacgcctggacccgggctcagagagtacaaacaggttatcgccccggtaaaagttcaggcgaccgacatcgcccgcggcgagctgcgcatcgataataagctctggttctcgaccctcgatgactacaccctgcgcgtggaagtgcgcgccgagggggctacgcttgccagccagcagcttaaggtgcgcgatcttgcgccaaacagcggccgcgatatcaaaatcgacctgccggcgctcgacgaccgcgaaaccttcgtcaacatcatagtgaccaaagattcccgtacgccgtacagcgaagccaaccacccaatcgccgtctaccagttccagctcaaagagcagaccgcagcaaaaacaccgctgattaacaccagcgccacctcgctgcacattgccgatgaacgactgagctacagcatcaccgggcataacttccgcgtggtcttctctaaagtcagcggcaaactgagcgaatggcaggtgaacggcgtagaccaggtgacccgtgagccgaagattaacttcttcaagccaatgattgataaccacaagcaggaatacgaagggctgtggcagcccaatcatctgcaaatcatgcaggagcatctgcgcgaattcagcgccgagcagcgcggcgatacggtgattatcaccgcccgcagcatcatcgccccgccggttttcgatttcggcatgcgctgcacctatcgctggcagattaccccgcagggccatattaacgttgagcttgcgggcgaacgttacggcgactatccgcacatcgtgccgtgcatcggttttatgctgggcattaacggtcagtttgaacaggtgggttactacggtcgcggtcccggcgaaaactacgccgacagccagcagagcaacatcattgacctctggcgcaccaccgtggacgacatgttcgtgaactatccgttcccgcagaacaacggcaaccgccagcacgtccgctgggccgcgtttaccgaccgtcacggcagcggtctgatggtggtcccgcgcgatccgctcaacatcagcgcctggcactatacggcggagaatctgcacgccgcgcagcactgtaacgaactgcgtcgcagcgatgacatcaccctgaatatcgacgcccaactgctcggcctgggctctaactcctgggggagcgaggtgctggatagctggcgggtgtggctcaaaccgttcaactatggctttacgctgctgccgctggaaggcgggagcgcttcctcgcagacgctggcgaatcatagctttggcgccggtttcttttcctccgattcacacagcgaggctgaaaaatgagaattctcgataacttagaacagtttaagcaaatttatcacagtgggcgtaaatggcagcgctgcgtagaagcgattaataacatcgacaatattcggcccggggtggcccactctatcggcgattcgctctcctatcgcgtggcaagcgacagcaccacggatgcgctgttcgttggcaaccgccgctatttcgaggtgcattactaccttcagggtcagcaaaaaattgagtttgccgccaaagagcagctgcagaccgtggcctgctatcgcgatgaaaccgaccgtgaatatttgaaaggcattggtgaaaccgtgcaggttcacgaaggacaaatggtgatttgcgacacccatgaagcctatcgctttatctgcgactcgccggtcaaaaaggtggtgctcagagtaactatcgaagacggctacttcctgaataagtaagcccgcgtgaagcaagatgaggccagcgggttgactcgctggccttcccggccctaaccctcaatgcgggccagataatttttcggaggacttatgtccgaatcagttcgtgccaaaataggtaaattcgccctgctgtcgatggcgtttgccgccgtatttaacgtacgaaatattgttaataacaacatcgagttagggctcagctccgcccctatctttctgtttgcgacggtggtctattttattccatttgtgtttatcatcgccgaattcgtgtcagcgaataagaattccgaatcaggtatgtacgcctggctgaagcagcctttaggtacccgcgcggcctatctcggctcgttcctgtactggtttgtgaacctgttctttttcctgtcgctgctgccgaacgtggtggcctacgcctcgtacgccattatgggttacgccattcctttctcgccgatggtcacgtcgctgatctctatcgtcctgttcgccatggccacccacatttccactaaaggtgcgacctggctggggaaaatctccgaatgcgtggcgtatggcgtcttcgcgctatttgcgatttacgtggtcggcgcttttaccgcgctgggcgcgggccatgtccccgcgcagccgattacgctgcacgccatggcgcctaccatcaactgggcgacgctggggatcatgtgctggattttccaggcggcaggcggggctgaaaccgtcgccgcgtacctgaacgacaccaaaggtgggcagaaatcgtttattaaagtcatcatcaccgccgggatcctgattggcggcatgtacgcgctgggctctttgctggtcaacgtctttgtggcacgtgaagatctgacctatgcggccggcatggtggaaatcttcaccggcctcggcgcctatttccatatttcagaagcgctgatgggccgcttcgtcggcatcattctgtttatcgccattttcggcagcatgatgatgtggaccgccgcaccggtaaaaattcacttctctgaaattcctgccggcatctatggcaaaaaaaccaccgagctgaacgtccacggcgtgccggtgcgcgccgcctggtggcaatttgtcttcgtctttctgatgctcatcgtgaacggtttcggctccgccagcgttcagcaaatgatgaacaccgctatcaacctgaccgcgggtaccgcgatgctaccgccgctgtttatcatggccgcctactttgttttccgctggaaacacgacgacacgccgcgcgacttccgcatggggtcacgaaaggttgggatggccgtggtgtcgatgctgatggtgattttcctggtcagcatgaccgcctcggctttcccgccgggggtcgatctggtgaatgccttcttcattaacgtctttatgaccgcagtcttctccggactcgcgtggtggtggataacccgctttgagaaaaaacagcgcaagagccaaccatcggtgctgaaatcagccgtaaatccggtgaaataagcgaccgttcctcccgccagcgttaaatcgcctggcgggatttttttacccgccagccgggatctcacgctcaaccattttcgtgatcgagttaaagcaattcatttttaccgcttttatttactaaaatttttactaaaattaaccgcaatacttaactacctctaccctacaaacaacacaatccccttcggccattctctgaaggacaatgtgtggagatgtgttatgtctgatatcaaacgtaataccatcggcaagttcggcctgctgtcgctgaccttcgccgccgtcttcagttttaacaacgtgatcaataacaatattgagctggggctggcgtcggcgccgatgttcttcctcgcgaccctgctctacttcgttcctttctgcctgatcatcgcggaattcgtttcgctgaataaaaactccgaagcgggggtttatgcgtgggtaaaaagctccctcggcgggcgctgggcctttattaccgcctacacctactggttcgtgaatctgttctttttcacctcgctgctgccgagggtcatcgcgtatgcctcctacgccttcctcggctacgagtacattctgacgcccgtcgccaccacgatgttgagcatggctttgttcgccctgccgacctgggtgtccaccaacggcgcaaaaatgctgggtcctattacctcggtgacctcgtcgttaatgctgctgctgacgctctcctacattctgctttccggcagcgcgctggtgggcggtattcagccagcggatccgattaccgtggatgcaatgatcccgaactttaactgggcgttcctcggcatcaccacatggatctttatggcggccggcggggcggagtccgtcgcggtgtacgtcaatgacgtgaaaggcggatcgaaatcatttgttaaggtcattatcctcgccgggatcgtgattggcgtgctgtactccatttcctcggtgctgattaacgtgtttatcagcagtaaagagctgaaatataccggcggatcggtacaggtcttccacggcatggcggtctggtttggcctgccggaaatcgtggtcaaccgttttgtcggcctggtctcctttaccgccatgtttggttcgttattaatgtggaccgcgacgccggtcaaaatctttttctccgaaatcccggccggcatatttggtaaaaaaaccgtcgagctcaatcaaaacggcgtaccggcgcgcgcggcgtggatccagttcctgattgtgattccgctgatgattatcccgatgatgggctccagtaccgtgcaggatttaatgaacaccatcatcaacatgaccgccgccgcctcgatgctgccgccgctgtttatcatgctggcgtatctcaacctgcgccgcaggctcgatcatctgccgcgcgattttaaaatgggctcacgcaccaccggtattacggtggtctcgatgctgattgttattttcgctatcggcttcgtcgcctcaacctttcccaccggcggcaatattctgaccattattttctataaggtcggcggcattgttatcttcctcggatttgcgtggtggaaatacagcaaatacgtgaagggattaacggcagaagaaaaaataattgaagcggcgccggcttccgacgcgtcataagccattttccctaaaataataaattacaatatctcttaataatgcgatgaaaaagaataacttgatttacggggcgcttgccgccctggccttctgcacacctgccatagcggctgatgttgctcacccggcggaacatgatgatatgaaaacgcctgaactgagcaccacttcctatcgtttttacggtgaactgggggtcggcggatatatggatttagaaggcgaggataaacataaatatagcgatggcacctatattgaaggcgggctggaaataaagcacggcagctggtttggcttaatttatggcgaaggctggactgtccaggccgatcgtcaggggaatgcctgggtaccggatcacggctggggcggattcgaaggtggaataaaccgcctctacggcggatataaaaccgatagcagcaccgagattatgctcagcctgcgccaggattcatcgctcgacgatctgcagtggtggggcgatttcacacccgacctcggctacgtgatccccaatacgcgcgatattatgtacgcgctcaaggtgcagaacctggcgggagattttcgctacagcgtgaccgccacgcccgccgggcaccacgatgaaagcaaagcgtggctccatttcggcaaatacgaccgctacgacgataaatatacctacccggcgatggtcaacggctacgtccagtacgatattgccgaaaaggtcacctggatgaacggtcttgagctgaccgacggtaccggtcagctcttgttaaccggtattctcacccccaatctcgccgcccgcgcctggcaccataccgggcgcgccagggggcaaaacgtgccgggaacggagaccggctttatggccagcgccatgtatgaagcgctcaagggcgtatatctctctaccgcctatagctacgccaaacaccgcccggatcgcgccgccgaggaaaccacctcgtttatgcagttcggcatctggtacgaatacggcggcggacggttcgcgaccgccgcggacagccgcttctacatgaaaaacgcctccggagacccgagcgaccaggttttcctgatgcaatatttctattggtaaaaagggatatcaataccgtgaaaatcatcaccactctgacgccgctggcctgcgccctgctgctaagcttttccgcccacgcgctgaccgcggatgactttaaaaatgttatcaaccgcagcggcgcgccgcaggcgatgcaggatttcgatggcgacgaccaccagcgtttcaacccgtttttcgatttgggcgcatggcatgggcatctgctgccggacggtccagccaccatgggcagctttccggggcccgcgctgctcaccgaggagtacatcaactttatggcgacccatttcgatcgcctgacggtgtaccagaacggcaaaaaagtggccttcaccatgcaggcctggagcctgcccggggcgctggtgcaaacgctctccgcgcccggcgtacagatcgagatgaccctgcgctttgccagcgcgcacacctctttactggagactaaaatcaccagcagcggtccgcttaagctggtctgggacggcgagctgctggagacgctctccgccaaagaggggaaaccgcagtcaacgcaaaccatcgaccaggccttcccggactatcagcgccgcctgagcgcgacccacgacggactgacggtcagcttcggtaaagtccgttccgcatcggatttaatgacctccggcgaatcgcagtatcagatccatcgctccctgccgacggtcacccaaatcgatggccatcgattcaccagcagcgcgcaaatcaacggctcgaccacgctctataccacctactcgcacctgctgaacgccgagcaggtgcgccttgagaaagcgcaaatccgcgatattctggcgcgaccggcgcactatctgcgcgcttccgaggcgcgctggaacggctatctgcaaaaggggctgaccaatcctgatgccacggcgcagcaaacccgggtggcggtgaaagcgatcgaaacccttaacggcaactggcgcgcgccgggcggtgccgttaagcacaacaccgtcacgccgtcggtaaccgggcgctggttctccggcaaccagacctggccgtgggatacctggaagcaggcctacgccatggcccacttcaacccggagatcgcgaaagagaacatccgcgccgtcttctcctggcagattgccgccgacgataaagtgcggccgcaggatgccgggttcattccggatctgatcgcctggaacctgagcccggagcgcggcggcgacggcagcaactggaacgagcggaataccaaaccgagcctggcggcctggtcggtgatggaagtctataacgtcacgaaagataaagcctggctggcggaaatgtacccgaagctggtggcctaccatgactggtggctgcgcaaccgcgaccacaacggcaacggcgtgccggagtacggtgcgacccgcgataaagcgcacaacaccgccgatggcgcgatgctgtttaccgtgaaaaagggcgataaagaacggacgctttccggcctgaaaacctacgagcaggtgacggcgaagggcgattacgacagcctggagatcccggcacaggtggccgcctcctgggagtcggggcgcgacgacgcggcggtcttcggctttatcgataaagatcagctggataaatacatcgccgacggcggcaaacgcagcgactggacggtgaaatttgctgaaaaccgggataaaagcggcaatctgctcggctattcgctgctgcaggagtcggtcgatcaggccagctatatgtacagcgacaaccactatctggcggagatggcgacccttctcggcaagccggaggaggcaaaacgctaccgggcgctggcgcaaaagctcgccgactatatcaacacctgcatgttcgacccgcagagcaaattctattacgacattcgcattgaagcgcagccgctggcaaacggctgtgccggtaagccgatcgtcgagcgcggcaaaggaccggagggctggtcgccgctgttcaacggcgcggccactcaggcgcatgccgatgacgtcatttcggtgatgctggacaacaaagagttcaatactttcgtaccgctgggtaccgccgcattaacgaatcccgcgtttggcgcggatatttactggcgcggccgcgtgtgggtggaccagttctggttcggcctgaaagggatggagcgctacggccaccgcgaagaggcgctgcagctggcggacgccttcttcaggcacgcccgggggttaacctccgatggcccgattcaggagaactacaatccgctcaccggcgctcagcagggcgcgccgaacttctcctggagcgcggcgcatctgtacatgctgtataacgagtttttccgtaagccatagaatattgccctcattctacccctctcccacagggagaggggtattcaaaatcattgactataatttaatcgcggacttgttataactcactgagtaaaaagataaagctttaaatttattgttatcagttaatgggcttaaagaaattgaaatgctagttaagcatcaaaagtttcgctgaatcattcaccagataattattaactaaatatgaattcctggtctgaatttcattgaagaaattcagattccttttattatttatgtgatcacgaccgcattatttaattataaaaatgtgtgatgttcagtctttcattagagtggtgaatcacgcatgtactttctccaggaagataaaaacatccatcagtatatatgtcagcacgaattatgggttccagggcgcgttgttgatctatataacagcaatacaaacaaaaaagaaaaaatgttagagccgctttggagaaaatacaatgcaaatttagagggggtaatggtatttttatccagaatagaagctacaatatacagtatacatctggagaaaaaattcagtgaaaaatgggcagtttattccctgaatgaatttaacattaaagaaatgatgattcataatcagcgtgttaaaaaaagtgaagattataatgtattgctgagtgcaggtttttgggctaataaagataatcaattaatgtattcaggacatcatcttgtacaggttacgattccgattacttataactccaatgctgtagcaaatgaaaatggtcatgccatattaagaataccatcaaacgtcatagaacactttgaaaaatactggaaatcaagatttgcagattttaaagattatactgaattccttgcaggttcgaataatgaaatcattcaggaacaagccttacttgcatacaataatttaagcttaattgaatctaacagtatagaagactgccaatatattaccacatggaaaaacaactggatttttaataatccagaaaatttaactttgattaaatgaggtcattatgggcattggctattttttagtgcgtggtaatagaacaacctgtggtggtagtattatagaaggatgtgataatcattctatacacggtcaggccacagcacgtaatggtgataaatatatatgtggagttgataaaaaaatatatcatattgcgggaggcatacctaattattttatacatggcgttgcagcagctggaactgcacatagcagagggacatgtgcttgcaaatgctattttataaattcttttactgattgtatttatggatatgaatctgaaactattaaaagtactgcgagtgctacccggcccacttcacccatacactcacaatcattatcagaatcatcaccagcaccaaaacccgttacacccgttgtagaacttgctgaagcgcctacaaaaccgcaggaaaagcgtgaccccgtagatgcaggcttttgcgtactgccctatggcgcgactcccgcatcatatgaaccgtatcttttcactacgcctccagcgggaacacgagaactctattatcaactgaatccagaaatgaagaaaaagcctggttcgatattaatcgtggtggatcctgaaaagcaggaaccagaacaggttgagacgctacagcgagcaagagacagaattgatgcagcattggcccctctgacagttcaggaagcaaagttattgcatgataacagaggggcggtagatgcattttcatatcagctttttgccgataatttaggtaaagctggtgatggattaggctatatcagtgaaataggaaaaagttattatgatgaaatcaatagaattttggttgagattgaagatttatataaaaacacttacaatcgcaacagaggtattatttcaggtcaagagttttttggtcaaaggacaaggttattcaaacaacttgatttggttttaactaaattctcaaaagcacagttaaacttaggcgaatatcagagcattaaaagagtgttaggcttgtcaacaagatctattatgcaccgctgggatagaacaggtgttgataatatagaaggatatgcaacatatattgaacagtcagctaaacttatgaagattatgaaaacagtagggtatgtgggcataggtttagattttgcaagttatacttcaaatgtttatgatgcatgttcgaaggggcgagaaagtgaatgccgtaaggcagctattactgaatatagtaaatttgggtttaagcaaattggaagtgctgctgttggtagtgcaagtggatgggctgcccgtggagcctgtatgtggatactgggaatagtaacttctgaagttggcgcattaggcgctggcttatgtttagttacaggagtgggagcttcgctaggagcagcaaagctagttgaaggaggagcagaagatttaggtgaatcttttggaggggatattctttatgagaaactttttaaatagcaatccgaatttcattgtttatctggtggcattttctatgcttggcatgttattaattatgataatttcatttattaataagattgcctacagaaaaatcgtttcgctttatattaataaatattcacggctaccaataacagcagcattagcaaaagaggctagtttaatagtcacgccaggtgcatattttgcaaaaattggattcattatagaaacattaacattgccatataataaaatatccaatcatgatatgacaaaagaacaatatgattatataaacaatttaccaaaaaaattgactattggttttaaaatagaagcagttttatggattatttccatacctacaatgatagtagggtttatattgcaagcagtttataattaaaaaaaggactctgttgagtcccttttcattttttcgttgttatttcagtgcaccataaatctgttcgacaatccatctatatgtcgccactggcgaatgcggcctgttaccgagaataacgatagccggatcgatggccgtaaacgtgcctgtccatcctgtggccgtatgtcaaaaagtcgacatgacaacaagccgtagccatatcagtaagcacattagtacggaaggaatggataccgtgtagagatgtggaaaagcgcttctggcagactgtaataaatgcacgatgaagtctctgctgttttgttagcgcaaccagcagatcgcacttcaccgtgcttttcatttttctggggtacctcagcccttcaggaaagggccggggtgagggctcgtcttacacctccggcagcaggccgataaagctgcgcttctgccgcggctgcgacatcagcgcctccagcttcgccacgcaggccagatagtgcggggttttcttgtgcgccagcaccgcttcatcatctttataggcttcataaataaaaaagcgcgtcttcacctccgggtcctgcaggacgtcaaagcgcagattgcccggctcctgcagcgccccttcgtagttggcgcggaacacctcaagaaactcgtcgacccgttccggtttgatattgatttccaccagcgttacgttcattgcagctctccctgtttttcctcctgccagaactgatacgcctcgcgggcactcaggttctcatgcaccacttttttcaccgccttcagcatcgcgcgcggcgcgctggactggaagatattccgccccatatccacgccggaagccccctggtcgatcgcccgccagcacatctccagcgcctcctgctccggcagctttttacccccggcgatgacgatcggcaccgggcagctggcggtgactttctcaaagccttcctcaacaaagtaggttttcacgaactgcgcccccatttcggcggcaatgcggctggccagcgagaagtagcgggcgtcgcgggccatctctttgcccacgccggttaccgccagcaccggcataccgtagcggttgccggcgtccaccagcttgataatgttgttgatggactgatgctcatgctcgctgccgatatagacctgcgccgccaccgcgcagacgttcaggcgcagcgcatcttccatcgccaccgccacgcactcgttggaaagttcgctgaggatcgagttgccgccggaagcgcgcagcaccaccggtttgttggtcgccgccggcacctgactgcgcagcacgccgcgggtgcacatcagcacgtcggtctcttcgaacagcggcgcaatagagagatcgatacgctccagcccggtggtcggcccctgaaaatagccatggtcgaacgccagcatcaccgtgcggttgctctgcgggttgaagatacgcgccagccgcgactgcatcccccactccagcgacccgcagcccttcagcgtatagagcgtattctgctgcggacggtctaagccgaagttttttccctctttgatatcgtctaaatcagccatctcatcctccatcagaaatcgtagttattgatattctctttggtgaacaccacccgctccggcagcagcacgatgccgttgcctttcgcttcatactgatagccctgcacgctgttgggctcgactttcagggcgccgagatctttcacatcaacgctgtcgccgacgttaagatcgccctttttcagcagacgatcggcgacgttaaccgcgatcttgccctgctgcaccacgtcccacaggccgaaggcttttaccgtgccgcgctccacgtaggggcgcatcacgttcggggtactaaagccgacaatcgccacgccctggcgcttgagattctctgccgcctgggcagccgccggaagcgcgttggcgtccggggcgataatggcgtcgagatccgggtacgcttttaagatcccctcggcggtttgcagcgatttagtggcgtcgttatagccaaactgcgtggtcaccacttcccactgcggatgcgctttttcgattttggacttcgcctcttttacccactggttctggtcggtcaccgtcgggctggagtagaaaaacgccactttggcgccaggcttcgtcacctgcttttccgccatctccaccagcaggccgccgagctgctgcggcgtcccctggttgatatagatgctgcggcactctggtttggtatcggagtcccaggtcaggaccttcaccccgcgctgcatcgcccgcttcagcgccgggcacagcccgtccggcgatacggcggaaacgataatcgcgttgtagccctggttgacgaagttgttgatcagctgcacctgcccggagacgctcggttcggtcgggccgtcgtaggtgacgtccacgccgagcgctttgcccgcctctttcgcgccgttaccgccgctggtaaagaagccgacgccaaccagcttaggaataaaggcgatacggtccgccgcctgggccgatgccatacccagcgccatcgccagcacgatcagttttgttttcattttatgctccgattgttttacgcgagaaaagacgccgccagctcatccgcacccattcacggtgcaggctcagcgaacgccccatcaccaccacaaccaacagcgcccctgacagcgcgctcgacacctggttggggatgccgaccatttgcaaaccttgttgtaaatagcccaccagcagcgcggccagcgccgtgccgacgatcgagccggaaccgccgtagatattggccccgccgagcaccgcggcggtcagcgccggcatcagcaggtcgcggcctaagtccgagcgcgccgagccgaaataggagaccatcaccagcgccgctaccgccgacgccacgcccaccaggccatacagcgcgtagggcatcccgttaacggaaagcgcggcgtagcgcgcggcgcgcgggttctgcccgagcagaaaaaggtgccgcccaaagcgcccgcggtgggccagcagccagaagaaaaaggtgataacggcgaacagcaccagcggtatcggcaggccgaacagggtcaggttggcgaaggcggtaaagctatccgggaatccgccgatgccttcgtagccggttgccccggccatgccagaaagcagcagcgcgccgccgccgtagaggtaaagggtgccaagcgtaatcaccagcgggctaatgccggtgtaatgaatcagcgccgcgttcagcaacccgcacagcaggccgagcagcagcgtcagggggatcgcgagactcatgggccagcccgcctgcatcatcacccccagcgcgatggcgcacaggccgatggtggaaccgagcgaaatatcaatcccgccgctgataattaccagcgtcagcggcagcgccacgatgccaatgcagataaagtcgctggtgctgaacagcagcatattgagatccagcatgcgcggattcagggcgccaaacagcaggatctccagcaccagtagcgccagcagcgcgctttcccagttgagcttcatttacgccacctctttgtttttgcgttcgggaaacggggccacgcgcttgccccctttattaccgggctgaaagcggctgtacttcagcgcccgctgatggcgggccagcgcctgacgcagacgcccgtcgagcaccagtacgccgagcagcaccaggccggcgatgaagtcgttccaccacgccgggagacggaacagcaccagcacggtgtcaatttgggtgaggaagaaggcgccgagaaaagcgcccagcagcgtgccggtaccgccaagcaacgagatcccgccgagcacgcaggcggcgatggccttcatctccaggccgctgccggtctgattgggcacaaagccaatctgcgcggcgaacacaatcccggcgcaggccgccagcatgccgttaagggtaaatgccagcatccgcgtgcggttcaccgccaccccgagctggcgggccgcggcgaggttatcgccgacggcgtaaaaatcacggccaaaggcggtgcgcgacagtatccagccgcccgccagcagcagcgccagcaccagccagcccagcggcgaaataccgatgaacgccggttccgacagcgccttcaggctgttcggcaagccttcaatccacttaccgccggtccacagcagcatcaccccgcgataaagcccgagggtgccgagggtggcgacaatcgccgggatgcgcagccccaccaccagcaggccgttaaaggcgccggccagcgcgccgatcgccagcgcgaaggcgatggcggtcatcaggccatacccgctattcagtgccacgcctgtcgcgatagcgctcaggccgacggtggagcctaccgaaacgtctatattgcgggtcagcatcaccagcgtcgcccccagtgccagcaggcaaaggatctgcgcgctggcaaagatcatggccagggtttgcaaactgaaataagccgggttgagcgccaccagcccggcaaacagcaccacgatggcgagaaaggcgctcagttcacgattctttaataacgttttcatgcctgtcctccgaaggccagggtcatcatccggtcaacgctgaccgcctgctgcgccagctcgccgctctgcctgccctgatgcatcaccagcacccgatcggccaggccaacgaactcgtcgagatcgctggagatcatcaataccgccacgttctgcgcggcgacgcttttcaacagctgatagatgtcggcgcgggcggaaacgtccacgccgcgggtcggctcatcgacgatcagcagcagcgggttagcctccaggcagcgcgccagcagtaccttctgctggttaccgccggagagcgtgcgcaccgggcgatcgccatcggccattttgatccccagcgcccggtgatagcgctccaccaccgccgcttcgcgcctgttctgctgccacagcgacggctggttaaacatcaccgtgttccagcgcaccggcgcatcgagaaacagcccggaaacctgcctgtcctccggcagatagaccagcccgcaggccagcctggcgcgcgtactgtcgcggctgatatcgcggttttccagccatacccgcccggcgcgcgccggtcgcagaccgtagagcgtttcggcaaattcggtgcgcccggatccgaccagcccggcgaggccgacgatctccccggcgcggatctccaggttgagatcgataaaaccttctccggtcagatcttcaaccctaaggaccgggaaatcctgcgcctgagtgcggcgattgcccggcagcgccagccacagcttttgcgtgtcgctcagcgcacgatcgcggctgacgggcgtcattgcgccgatcagctgattgtcgccgtagtgcgcggtttccccgctcagcaccaccgcgccgtcgcgcatcaccgagacgtggctggcgacctggcggatctccggcagcttgtgcgagataaacacgatcccgacgccgagcgcctgcaaagagcggatctggcgaaacaggcgctcggtttcccccggcgtcaatgaggcggtgggttcatcgaggatcaggatctgcgcgtcgcgcatcagcccgcgcaggatctccaccatttgttggtcggcgacttccagggtgctggccgccgcctcaaggttaagctggcagctaagctgctgaagcttttcctgcaggcgggcctcggtatccgcccgctttggcagacgaaaaagaatattttcccgcaccgtcagattggggaataacattggttcctgcggcaccagatacacgccctgctgatgggcctgggcgggagtaaggcgcgcaaatgtacgttcgccgaggatgagctcaccgctgtcgggggtctctaccccggcgataatcttcatcagcgtcgattttccggcgccgttaccgcccatcagcgcgtgcacctggccggaaagcagcgtgaaatcaatctgcttcagcacggtgacgccggagaactgtttgccgatttggcgagcttcaagcagtggcttcatcatcgcgcctcattttgaacaaaagattttttaaattaataatgttcaaaagcgtagacggtgaactatatttacaaccgtgcaacgatcacagttttatgctttcgatcgtttgaagaaaaccagcggacaacgaaagatccgttttgccagtcggctcacattttccgaccgcgcaataacgaacatatgatctaaatttttataagagttcaatttatgagcgaaaaacgcattacggaagagagccgctacgccgggctggcgttagccgaggaggagctggtggcgcgggtggcgtggtgttactaccacgacggactgacgcagaacgacatcggcgagcgtttagggctgccgcggttaaagatctcccgcctgctggagaagggccgccagtcgggggtgatccgcgtccagattaattcgcgctatgagggctgcctggcgctggaaaccgaacttcagcagcgtttcggtctgaaaattgcccgcgtgctgccggcgctgaataccccgccgatgaacacccgcctggggattggcgcggcgcaatcgttaatgggcgtgctggagccgggacagctgctggcggtgggctttggcgaagccaccatgagctgcctgcagcacctgagcgggtttatcggctcccagcaggttcggctggtgacgctttccggcggcgtgggcccgtatatgaccggcattggccagctggatgccgcctgtagcgtcagcatgatccccgcgccgctgcgggtgtcatcggcggatgtggcggagatcctgcgccgggaatcgagcgtccgcgacgtgatcctggccgcgacggcggcggatgcggcggtggtaggtatcggcgccattgaccagcgccgggacgccaccatcctgcgctccggctatatcagcgaaggcgaacagctaatgtacgcccgcaaaggcgcggtcggcgacattttaggttatttcctgcaggccgacggcaaaccggttgaagggctggagatccatcgggaactgctcggcgtcacccttgatgaactggcgcagctgccgaccatcgtgggcgtcgccgggggcacagaaaaagcgcaggcgatttacgcggcccttatcggcaagcggattaatggcctggtaacggaagagacaacagcacgcgcggtgctgacgctggcctcataacggccctgcgccgcgcaacacgagcgaggcgcatgtcatgagttacctgttagcgttagatgccgggaccggcagcattcgggcggtcgtattcaatctccagggccgccagatggcggtcggccaggccgaatggaagcacctgagcgtggacaatgtccccggctcgatggagttcgatcttggcaccaactggcagctggcctgtcagtgtatccgtcaggcgctggccgccgcccatctctctgcggcggatattcagtccgtagcctgctgctcgatgcgtgaaggcatcgtgctttacgaccgcaacggcgaggccatctgggcctgcgccaacgttgacgcccgcgccagccgcgaggtggcggagctcaaagagatccacgacgaccgttttgaatccgaagtgtacggcgtgtccgggcagaccctggcgctgagcgccatgccgcgcctgctgtggctggcccatcatcgcccggatatctaccgcaaagcggcgaccatcaccatgatcagcgactggctggcggcaaagctttccggcgaactggcggttgacccttctaacgccggaacgaccggcatgctcgatctcttcagccgcgactggcgcccggcgctgctggatatggccgggctgcgggccgatattctctcgccggtcaaagagaccggcagcgtactgggagcggtgaccgacgcggcggcggcgcaaagcgggctgcgcgcgggcacgccggtggtgatgggcggcggcgacgtccagctcggctgcctgggcctcggcgtggtgcgcgccgggcagacggcggtgctcggcggcactttctggcagcaggtggttaatttgccggaagtccgaactgacccggagatgaatattcgcgttaacccgcacgtcattcccggcatggcgcaggcggagtccatcagcttcttcaccggcctgaccatgcgctggttccgcgacgcgttctgcgcggaggagaagctgattgccgggcgcctcggcgtcgacgcctacagcctgctcgaagagatggccagccgcgtgccggcgggttcccacggggtgatgccgatcttctctgacgccatgcactttaagcagtggtaccacgctgcaccatcgtttattaacctctccatcgacccggaaaaatgcaataaggccaccctcttccgcgcgctggaagagaacgcggcgattgtctctgcctgtaatctggcgcaaatttcgcagttttccggcgtgcagtttgacagcctggtctttgcgggcgggggctcaaaaggcgcgctgtggagccagatcctcagcgatgtcaccggcctcccggtgcgggtgccggaggtccgcgaggcgacggcgctgggctgcgcgatcgccgccggcaccggtgccgggctgtacggcgatatggcggcgacgggcgagaagctggtgagctggcaccgggaatttacgcccaatccggcgcatcgcgagctgtatcacgagatgatgatcaaatggcagtcggtgtacgccgagcagctcggtctggtggacagcggattaacgacctcgatgtggcaggcgccggggctgacgcgccgtgcccctgttgccccctcaccctaagcctctcccctacaggagaagaaaccgtccgggcataactggccccggcgccattccgcccttctccctctcccggagggagagggccggggtaagggagaaccttccgccgttctttgaatcccatcacaatcgccgcactccccttttcccttttcgcccgcggcggctaaattagtaactcatccgaccacataacaataattttacactggaagagattatgagccgctacccgtcgcttttcgccccgcttgacctggggttcacaacgctcaaaaaccgcgtgttgatgggctcgatgcacactggcctggaggagctgccggacggcgcacagcggctggcggcgttttacgccgagcgcgcccgccacggggtggcgctgatcgtcaccggcgggattgccccggcgccttccggcgtcaccatggcgggcggcgcggtgcttaacgacgccagccatctcgctcatcaccgccatatcaccgatgcggtacacgaggagggcggcaaaatcgcgctgcagatcctgcataccgggcgctacagctaccagccgcagctggtggctccttccgcgctgcaggcgccgatcaacccctttacgcctcacgaactgagccacgaagagatcttacagctgatcgatgattttgcccgctgcgcccagctggcgcgggaagccgggtacgacggcgtcgaagtgatgggctcggaaggctatctgattaacgaatttcttgccgcgcgcaccaacctgcgcgacgaccagtggggcggcgactacgcccgacgcatgcgttttgccgtagaggtggtcagagccgtgcgggagcgcgcgggcagcgattttattattgtctaccgcctgtcgatgctcgacctggtcagcggcggcagcaccctggcggaggtcaccgcgctggcgaaagcgattgaggccgccggggccacgattatcaataccggcatcggctggcacgaggcgcgcattcccaccatcgccactccggtaccgcgcggcgcgtttagctgggtcacccgcaagctgaaaggcgcggtgtcgatcccgctggtcaccaccaaccggattaacgatcccgccgtggcggaggcgatcctggcccgcggagacgccgacatggtatcgatggcccgccctttcctcgccgacagcgaatttctctctaaagcacagagcgggcgggcggatgagatcaatacctgtattggctgcaaccaggcctgcctcgatcggatcttcgccggtaaagtcacctcgtgtctggtcaacccgcgcgcctgccatgaaaccctgatgccgatagcgcccgcgaccgcaccgaagcggctggcggtagtcggcgccggtcctgccggcctggcctttgccgttaacgccgcctcgcgcgggcatcaggtgacgctctttgacgggcaccatgagattggcggccagtttactatcgccaaacagatccccggcaaagaggagttccatgagactctgcgttattaccgccggatgctggatcttaccggcgtcgcgctgcggcttaaaacccgggtgacggccgacgatctgcgggcatttgatgagattatcctcgccaccgggatcgccccgcggatgccggatatcgccgggatcgatcatccgaaggtgctgagctacctcgatgtcctgcgtgataaagcgccggtcggcgagaaggtggcgattatcggctgcggcgggatcggctttgataccgctatgtacctcagccagtccggcatcgccaccagccagaatatcgacgagttctgtgcggaatgggggatcgataccagcctgcagagcgcgggcggattacgcccggaggggatgcagctggctaaaagcccgcgccagatcgtgatgctccagcgcaaaaccagcaagcccggcgacgggctggggaaaactaccggctggatccatcgcgctaccctgctggcccgcggcgtcaaaatgatccccggcgtcagctatcaacggatcgatgatgccggccttcatgtgacgatcggcggcgaatctcaggtgcttaacgttgatcatgtgattatctgcgccggtcaggatccccgccgcgagctggccgatccgctgcaggcggcgggtaaaacggtgcatttgattggcggctgcgacgtggcgatggagctggatgcccggcgggcaatcgctcagggcacccggctggcgctgtcgatttagggaaagaaaacccggccggtagtccgactaaggtatcagccggtagcccggctaaggcgtcagccggtagcccgactaaggcgtcagccggtagcccgactaaggcgtcagccggtagcccggctaaggcgtcagccgcaagccggggaaaccgggaaagccgataacgctcaacgctgtttgcgcatctttgtcgctttcaacaccacaaatttattattggtggcgatcgtcgtgcagttaccgaacgcgcgcttcagcttgcggaaataatcgagatggcggttgccgacgacatacagctcgccgccgtacttcaggctgcggcgggcgtcgttaaacatctgccaggcaatatgatcggtgatcgcatgctgctgatgaaacggcgggttgcagaggatggcggcgaagcggtccggctcaatatcggacagcgcgttattcaccacaaactcgcagcgctcgaggtcatccggcatattggtttcgacgttcagccggctggaagcgaccgccatataggactcatcggtaaacatcacccgggcgtccgggtttaaagccagcgctttcaggccaatcacgccgttgccgcagccaagatcggcgatctcgccttcaatatttgccggcagatgctccaggaagaagcgcgcgccaatatcaaggccgctgcgggcgaacacgttggcgtggttgtgaatcgtccacggcgtaccgtccagcggccagctgtaggtttgcggcgcatcggccacctcaggcgcggtaaaggtacagaaaatcagccgcgcctttttccatgccagcgatgtggtggtggtgccgaggatcttctcaaacagcgccagggtggaattgtggacatcccgcgctttcgcggcggcgatgatacgggtttccggcgtgacaacctcgcgcagcgcgcgcagctgctgctccagcagcgccagctgcttcggaaccttaatgagcaccagcgccggcgcggcaggcagttcgctcaggggatcctgaaaacgtacgctctcttcatcaatgccgttcatccgcaggttgtagcgggtcgccagctcagatacgtaggaatcgttgatgctgaccgggttgcgttccgccagcgcgcagcccagcgcgccaaagctgtcattgaaaatgagcgtcaggccgtcgacgtcattcacctgttgcagcagatattcatccgccgcttcccacgcctgaagcgcttcctcttcagcattcggcgggaaccgctctaatgtgaataactcaccgtttaactctacctggctcatcgcctttgtgcctccggaactctaaaacccgcgagtttatacgcaaacttcgcccagtagaatagagatgcgccgattatctccatctgccgggcgacggtccgttacgccgggaggtcgtcctgcgccaggcgcgacaggcgtttatcgtccaggctgtacttgctcatgataacaatcagcagcgccaccagtaccccggggaagacggtgaacagcagcgcgatcatctgcagcgcggagtcggtttgctgcgctgcgccgccaacgtagtcgccccatgccagcatatagcccaccagcgcgccgccgatggcgatccccagcttgatggcaaacaggtttgttgaaaaaacgatcccgctgagttttttaccgctgcgtttctcttccgcatcgataatatcggacagcatgctccactgcagcggcgtggcggccagctgaataatattgatgataatcaccagcgcaaagatagcggccacgttccccgccgggacgaagtacatgcctatcagcagcgccgcctcgatggccatcgagattttaaaccctttcactttatcaatatttttaaagataaacggggagagcatcgcccccagcacgccggaagccagggtggtggtcagcagcaggctgcccagatccgcccgccccataatattgttgacgtaatagagcgtggtcccgcctttaaacagcaccgcaatcaggttaacgacgttgagcgcgaagagaatgcgccagtccttgttggcgagcagggttttcagatcatcaagaatgctgctttgattgttgaccgcgatatccgtggtgtagcgctctttcgtcaggccgaagcagataaagaacagaatgatgctcaggcaacccatcacaatcatggtgtaaaaatagccgttttgcacattaccctgacccagccaggccaccagcggcagcgcggtcagcgagacaatcagaccgccgagcgtactgagcgcaaagcgccaggactgaagcgaaacgcgctcgcgggaatcgttagagatattattgatcatcgcgcaatacggaacgttaatcgccgtatagaccagcgataataaggtataagaaacataggcgtaaatcagcttgccggtatagccgaaatccggcgtataaaacgttaagcagcaaagtacgccaaaaggaatcgcgaaccataaaatataagggcggaattgcccatatttagtccgggtacgatccgccaccgcccccattaatacatcggtgaccgcatctaataccctgactgcgagaaacatggtccccatatgcgccggacttaaaccaaatacgtcggtataaaaccaggccataaacagcatcaccgtctgccagactaaattacagccggtatcccctaacccatagctaaatttttctttaatactgatacgggcagtgttcatcgcgcctccgccagaaagatcgttaatatttgtcctctgtacgttattgcttagggcttaccgattatgtataaatcatcctgttaaatataagaagagtgtactcgatgagtgatgaatctcccgttttcgaaaagatccccgtgggcgccggcgagctatttaccctgcgggtagataacataaacgatttcaatggcataaacgtagtcccgcattttcatatgatggacgaactgatgtggttccgagagtcggagggcagctattcgattggtgatgagaaatttacgataaaaaacaatactctgatttttgtccccgccttactgatccatgaaatgacgctcccggccgccgccagccacaagcgttatcttatgcaattcgaaaaagagtggctcgagggatacgacctgtcgctccccgccgcccactgcggtgcggtcgcttacctttccggcgaggaagccgagcgcctggagctgctgctgagctggtgcggcgagttcagcgactttaccgattcgctgtttcgctccctgatgcagagcgtactgctgcacgcctttaatagcctgaaagattccgtccccattaccgaacgcaccaaccatcgctatctgagcgagctgatcgaacttctgcaatctattgatgaaaatgaaaattttgagatgacaaccgaagaagccgcccgccgctgccggtggtcgaaatcctggttttcccgcacctttaaatccgccttcggcatcagcttcaaaaaatttatgctgctgcgcaaactgaatatcgctatcaatctactgaccaacaccgacctgaagatcagcgatatctcgcaaagcgccggcttcaccgacagcgcctacttctgcctcaagtttaaagagatgatgaacgacaccccgctggccttccgtcacaaagtcagaagcaccgatgccgtagggcgtcaggcggagaaataacgcgtttttgtgagccgcatcaccggataagtagacgtttattatataaatagccagagtctatatatccccgtcgctatcgcctatttacaatcatcgctatattttgcgcattaagggtaaatacgatgattcagaatcctgtttttaaaggttttaatcctgaccccagtatctgtcggcgcggcgatgattattatgtggcggtctcttcctttgaatggtttcccggtctgccagtttatcattcgagggatttaaaacattggcaactacttacccacgttcttaccgatgataataatccggatttaaaaaagctgccctccgccaaaggcatttgggcaccgagcctgacctggtgtgaagaggaaaagctgttctacgttatttatggcgtgatgaattccatgaattcacgttatttcgatgtagataactatcttattaccgccagtgaaatcaccggcccgtggagtgagccggtttatctccactctgccgggttcgatgcctccattttgcacgacaccgacggaaaaaaatggatcgtttccctggagtgggaaacccgcgaaggttacgaaaaaccgggcgccatttgcctggtggagtattcgccgcaaacgcgaagcgttgtcggctatccgcagcggatctggcgcggcggtaccgatcgcggctgtattgaagcaccgcatttgacgcgccgcggcgactattactacctgatggtcgccgaaggcggcaccggctacggccatgcggtcaccatggcgcgcgcaacgcaggtcgccggcccctatgaaggcgatccgcaaaaccccatcgtcacctcctggccggagaactttaacgcgcgccacgacgcagaccatctcaaaccacactacttcaatccgcaaacctatctgcaaaaagccgggcacggcagctacgtcgagaccccgacgggcgaagtctggttaactcatctttgcagcagacccttccgccaggcgctgcgctgcccgctgggccgcgagacggcgatacaaaagatggtatggagcgacgatggctggctgcgcatggcggccggggggaacctcgctcagcaccaggtggaagagtctaatctgccttctcagccgtttccggttaaaccagacagggatgattttgatgggcaagcgctggataacgccttctatgcgccgaggatccgctttcagcgctttaccagccttgagcgtaaagcgggttaccttgccttacgcggtcaggaatcgctgagctcgctgaataaagtcagcctgctggcgaaaaagctcacctcggtatacgccaccatcaccacgaaaatggatttcagcccggagatttatcagcatagcgcgggcctggcgatttactacgacaatatgaactatctgtttttgcataaaacctgggatgaagcctccggcgcagcgcagctggccattatttatatggacaacggtgagcgtcacgacgacccgcagaaaatctgccttacggagggggaaatctatctggcgatggcgattaatggccgggagatacagtgctcgtggtccgtggatggcgaaaaatacctcaacatcggcgcggtctacgacacctcgcgtttttccgatgaatacagccgctatggcgagtttaccggcgcgtttgtcggcatggcctgcgtggatagcatgctgcatcgtaaagaggcgctgtttgacttctttagctaccgggcggtcgaagacgcgataatcgagtaacgctgcctttctggcatcctgcccgcgcggggtgctagaatccgcggctgttgtcgctgaattacgcaaacaggccgcatgagcactttaacctatctccagggctaccctgaatccctgctggcgcaggtcaccgcgttaatcgaacagaaccgtctcggcgaggtgctgaaaaagcgctatccgcagggtcacgatatcaacaacgataaagcgctgtaccagtatacccaggatctgaagtcccgctttctgcgcggcgcggcgccgatcaataaggtgatgtacgacaacaagatccacgtgctcaacaacgcgctcggcctgcataccgccatctcccgcgttcagggcggcaagctgaaggccaaagccgaaattcgcgtcgccaccgtctttcgcgatgcgccggaggattttctgcggatgatcgtggtgcacgagctggcgcacctgaaggaaaaagagcacaacaaagcgttctatcagctgtgctgccatatggagccacagtaccatcagctggagtttgatacccgcctgtggctgacccagctttcgttagagcgttctgcgccatagcgcactggttttgtcatgatggcgtgctacagtgacgaaaggtcccttttacggagttcgtcaacgtttatgatacgtttcgcagttgttggcacaaactggataaccaagcagtttgtcgatgccgcccatgaaaccggcaaatataaactcaccgccatctactcccgcagccttgagcaagcccaggccttcgccagcgactatcccgtcgaacatctgttcacttcgctggaagatttagcgcaaagccctgacgttgacgcgatctatatcgccagcccaaactcgctgcacttcccgcaaacccgcctgttcctgcgccataaaaagcacgtgatttgcgaaaaaccgctggcctcgcacctgcaggaagttgaagccgcaatcaaaacggcgcgggaaaataacgtggtgctcttcgaagcgttcaaaaccgccagcctgccaaatttcctgctgcttaaacaatcgttcgacaagatcggcaagctgcgcaaagcctttattaactactgccagtactcttcccgctatcagcgctatctcgacggcgaaaatcccaacaccttcaatccggccttctctaacggctcgatcatggatatcggcttttactgtctggcctccgcggtggcgctgtggggcgagccccgcgcggtgcacgcaaccgccagcctgctggagagcggcgtcgatggccagggcacggtcgtactcagctacggggatttcgatgtcaccctgcaccactcgaaggtcagcgattccgccatccccagcgaaattcagggcgaagccggcgcgctggtaatcgaaaaaatctccgaatgccagaaagtgtgcttcgtgccgcgcggcggcaagcctcaggatctcacccagccgcagcatatcaatacgatgctgtatgaagcggaggagttcgctcgcctggtcgaagccaacgaggtggctcatccgggtctggaagtgagccgcatcacggcgaagctgctgagcgaaattcgtcgccagaccggcgtggtcttcccggcggatagtcaacctgtggcgtaaagctgtgtaaatggtccgtcggcctccattgacgccatttataacctgtaatactttgttacgcgcaaaggggagtaacttccttgccggccgatcgtcattacgatgcgtgaaaaaccgcatccggtcgccgggcaacagattcttgttgtaagtgagaccttgccggaaggcgaggtctatgcataaaagcgcagcggctgccgtcttccgacgtcagccgttttgtttttatgtaaggaaaatagtaatgaatactgtcggcacaccgttgttatggggcggattcgcagcggtcgtggtcatcatgctggctatcgatctgctgctgcagggacggcgtggtgcgcatagcatgaccatgaagcaggccgctggctggtccattctctgggttaccctctcgctgctgtttaacgccgctttctggtggtatctggtgcagaccgaaggtcgcgccgtggccgacccgcaagcgctggcgttcctcaccggctacctgatcgagaaagcgctggccgtggataacgtcttcgtctggctgatgctgttcagctactttgccgttccgcctgcgctacagcgcagagtgctggtttacggcgtactgggcgcgatcgtgctgcgtacgatcatgatcttcgccggcagctggctgatttctcagtttgaatggctgctctacgtcttcggcgcatttctgctgtttaccggcgtgaagatggcgctggcgaaagaggacgattccgggatcggcgataaaccgctggtgcgctggatccgcaatcatctgcgcatgacggataaaatcgaaggtgaacgcttctttacccgcaaaaacggtgttatctatgccacgccgctgctgctggtgctgattctggtcgagctgagcgacgttatctttgccgtcgacagcattccggccatcttcgccgtgaccaccgatccgtttatcgtgctgacctcaaacctgttcgcgattctcggcctgcgcgcgatgtatttcctgctggcgggcgtcgcggagcgtttctccatgctgaagtacggcctgtcggtgattctggtgtttatcggcatcaagatgctgattgtcgatttttaccatattcccatcggcatttcgctgggcgtggtcggcggtattctggtgctgacgctgctgatcaacgcctgggtcaataagcagaacgatcggaaaaaacagctgcagtaagacgtaaacggccgggtgaagacccgtttcacccggtcggcaacgtttgccgcgcattattcttactcatgtcacaaaatagttaatacatagttaaaaaataagatcccagcgcgataaacagcattttacccttccccagaagcgttctttccgtatactcaaccaggcaaacatctatttacatccggacataaacgttacaaataatacgtagccgggacggacagcgacatcactggaaggaatgaattatggcaaccccatcaccccgatcgaccctgctacggcgactggctcagggcagtctggtcaaacaaattttaattggtctggtactcggcgtgctgctggcgacggtctcaaaaccggccgccgtggcggttggactgctgggtacgctgttcgtcggcgcgctgaaagcggtggcgccggtgttggtactgatgctggtcatggcctctatcgccaaccatcagcaggggcagaaaaccagcatccgcccgattctgttcctctatctgctggggacttttgccgccgcgttaaccgcggtgctgttcagcttcctctttccgtcaacgctgcacctgaacgcggcggcagagagcatcaccccaccgtcgggtatcgtcgaagtcctgcgcgggctgctgatgagcatggtttctaaccccattgacgcgctgctgaacgccaactatatcgggattctggtatgggccgtcggtttaggattcgcgctgcgccacggcaatgaaaccaccaaaaatctgattaacgacatgtcccacgcggtcacctttatcgttaaagtggtgattcgctttgcgccgctgggtatcttcggcctggtcgcttccacgctggcgacgaccggttttgaaaccctgtggggctacgcccagctgctgctggtgctggttggctgtatgctgctggtggcgctggtgattaacccgctgctggtgttctggaaaatccgccgcaacccgtatccgctggtgatgacctgcctgcgcgaaagcggcgtatacgccttctttacccgcagctccgccgccaacattccggtgaatatggccctgtgcgaaaagctgaatctggatcgcgatacctattcggtctctattccgctgggcgcgaccattaacatggccggggcggcgattaccatcacggttctgaccctggcggccgtacacacgcttaatgttccggtcgatctgccgaccgcgctgctgctgagcgtggtcgcctcgctgtgcgcctgcggcgcttccggcgtggcgggcgggtcgctgctgctgatcccgctggcctgtaatatgtttggtatcccgaacgatatcgccatgcaggtggtcgccgtgggcttcatcatcggcgttctgcaggactcctgcgaaaccgcgctgaactcctcgaccgatgcgctgttcaccgccgccgcctgtatcgctgaagacgaacagctggcaaaaaacgccctgcgcagttaatctctcctctcccctccgctaacgcgcggaggggttctctttctgccccgccttttccgctttaaacggatcgataccgcgcttttgcatccgccggaatcggatgatattcagaccgttcatcaacaggaagctgccttcaatcagggtgccgccgatcgagcccagccaaaagttgtggatcacccagcaggcggtcgaacaccacatgacgcagcggacggttagacccgagcagcgaaagagcgcccaggtactggccagggtgccaataatcggcagcagctccatggcgtgctgcagcttcgccagccccagcaccagggtgagcacgataaacagagccatcacccacagcctgcgagtgcgcatggagatcagggtgcggacggtattcagctcggcgctcattcccgccggccaggcgcccatcaaaaagaaatgcacgccaatggtggcgctatagacggccagctgtagcttaaagcgacgctcatcgcggttgaaaaaggtcgtaatcccgatcagaaaggcgataacgccgacgccctgggcaagccaatacgcggtcatgaaaagtccttatatacccgtcatacttcaagttgcatgtgcgttagccgcgttcgttcaccccggtcacttacttcagtaagctcccggggattcgctcacttgccgccttcctgcaactcgaattatttagggtataagacaaaacggcgcatcatactctgaaacgccgcttttgaaacgactccatttattactcaataagatttcacgccgcagcggtggtgcgaaagatgacgagtaattaaagggtgacgccgcttttgaatatcgccagttcgcggaaatcattacgctcattgcaggtctgcttaccgttcgcaaaggccacaatggtatcgacaaactcctccagcagctgcggcatcgctttaccgtgaatcagctgaccggcatcgaagtcgatccagtgttttttcttcgccgccagttcactgttggtggcaattttcaccgttggcacaaaaccgccgtacggcgtgccgcgaccggtgctgaagagcaccatatggcagcccgcgccggccagggcgctggtcgcaaccgcatcgttgcccggggcgctcagcaggttcaggccgtgcacttttagccgctctccatagcgcaggacgtcgaccacctggctggagcccgctttctgcgtgcagcccagcgacttatcctccagcgtcgtgataccgcccgctttgttgcccggcgatggattctcataaatcggctggtcatgagcgataaagtactgtttgaaatcattaaccatcgtcaccagcttgccaaacgtctcttcatcgcgacagtggctcatcagcagctgctcggcgccgaacatttccggcacttcggtcagcacggtggtgccgccgttggcaatcagataatccgagaagcggcccagcatcgggtttgcggtgatgccggacaaaccgtcagagccgccgcactcaagaccaaacttcagttcgctcagcttacccggctcgcgcttgtcgtggcgcatcacttcatatagctggcgcagatgctccagcccggcttccacttcgtcatcctggtgctggcagatcataaagtggacgcggtcagggtcgaactcgcccagcgtttcgcggaaggcatcaacctgattgttttcgcagcccaggccgaccaccagtaccgccccggcgttcgggtggcgcaccatattttgcagcatggtacgggtgttgatgtgatcgtcaccgagctgtgagcagccgtaggtatggctgaagagatgaacgccgtcgataccttccgcgtcgttggtttccttcagaaaacggttctgcatctggcgcgccatggcgttaacgcagccgacggtcggcaggatccacagctcgttgcgcaccccgacttcaccgttggcgcgacgataaatctggatgtcgcgatccgccggctgcgcggcgggttcgatcagatccggttgatagctgtacgcgtcgagatcgcttaagttagtacgcgtattatgggagtggatatgttcccccggcgcaatatccgccagcgcatgccctatcggcagaccatacttaatgacgttgtctcccttcgcaatgccgcgcagcgtaaacttatgcccgcgcgcaatatcctgcgccaacgtgaccgtatcgccgtcaatggtgactaccgtgcctgccgccatatccgccaacgctaccgcgacgttatcgtgcgaatggattttaatgtattgcatatcaaccgacctctggtcttagttcagttcaatggcgaagtagtcacgcgcattgttaaagcaaatgtttttcaccatctcgcccagcagctgaatatccgccggcgcttctcccgcttcaacccagcggccaatcatctggcacaggatgcggcggaagtattcatgacgggtgtaggagaggaagctgcggctatcggtcagcatcccgacaaagcggctcagcaggccaagctgcgccagctgggtcatctgacgttccataccgtctttctgatcgttgaaccaccagccggaaccgaactgcatcttgcccggcatgccttcaccctggaagttgccgatcatggtacccagcacttcgttgtcgcgcgggttcaggcagtagaggatcgttttcggcagcaggttttcttcgttctgtttgctgagcagtttggacagctcttccgccatcgggcggtcgttaatggagtcaaaccctacatccggccctaacagtttgaactggcgcaggttgttgttgcgcagcgcgccgatgtggtactgctgcacccagccgcggcgggcgtattccgcgccgaggaagaccagaaccgccgttttgaactgcgcgacttcatgctcgctgagggcttcacccgccagacgacgcgccaggatgctatccagttcgctttcgttggcttcggcgaacagcaccacgtcgagcgcgtggtcagaaactttacaaccgtgagcggcgaagtgatccagacgtttggtcagcgcggactggaggtcggcaaagcggcgaatgtcggtgtcagacacttcgcccagcttcgccatgtagtcgttgaaggtggcctgttcgatattgaaggctttgtccgggcgccagctcggcagtactttcacggagaatgaactgtctttagcgacggaggcgtgatgttccagcgaatcgaccggatcgtcggtggtgccgaccattttcacgttcatctgctgcatgatgccgcgagcggaaaagctatcctgcgccagcagatcgttgcactgattccagatttcatccgccgtcgccggagagagaaccttacctgtaataccaaaaggacggcgcagctcaagatgcgtccagtggtataacgggttaccgatggtatgcggtacggtggccgcccaggcgtcaaatttctcgcgatcggaagcatcgccggtgcacaaacgctcggctacgccgttagtacgcatcgcgcgccatttatagtgatcgcctttcagccagatgtcatacagatttttgaaacgataattctccgcgatctgctgcggcggcaggtggcagtgatagtcaaaaatcggctggtctttcgcgtaatcgtggtacaggcggcgggaaaactcggtatcaagcagaaaatcttcggtcataaacggtgtcattttcgtgtcctcttcgccccctggggagcccatcagatgattgactataatgctgacaaagttatcacaccaatttccacaggccgaagtatttttcgtgagttagatcaataaacgatgacaaaaaaagtaccatgaaaggagtaaacgccccgccagagcgcgccagctctggcctttttcgcatgaacgaatgcccacacaaactttcccacttttgtgacgtcactcaacttttgaagttgtatgacaagttatcttgctgccgtcgaaacatataaaccgacggaatgcattaccgacgaactatcacgtcggatttaccggtatggacaccgaattagacacaacagttaatggcaaggttcgggccatacgaggtttcctctcctgaaccctccgtttcaccttcttcgcctcagttacagggctggaagatagccgcacccgctgcggatatataacaaacgatgaggtttacatgcgtaaaattaaagggttacgttggtacatgatcgcactggtgacgttaggtaccgtgctggggtacctaacgcgtaacactgtggcggcagctgcgccgactctgatggaagagttacacatctccacccaacagtattcctatatcatcgcggcctattccgctgcctacaccgttatgcaacccgttgccggctacgtgctggatgttttaggcactaaaatcggctatgccttctttgctatcgcatgggcggtgttctgcggctctacggcgctggcgggaagctggggcggtctggcgctggcgcgcggcgcggtgggtgccgccgaagcggcaatgatccctgcgggcctgaaagccagctccgaatggttcccggcaaaagagcgttcaatcgccgtcggctacttcaacgtcggctcctcgatcggcgccatgattgccccaccgctggtggtttgggccatcgtgatgcacagctggcagatggcgtttattatctccggcgttctgagctttgcctgggcgatggcgtggctgattttctacaaacacccgcgcgatcagaaaaaattaactgaagaagaacgcgactacattatcggcggccaggaatctcagcatcagaccaacaacggcaagaaaatgtcgccgtggcagattctgcgcaaccgtcagttctggggtatcgccctgccgcgtttccttgccgagccggcgtgggggaccttcaacgcctggatcccgctgttcatgtttaaagtctacggctttaacctgaaagagatcgcgatgtttgcgtggatgccgatgctgtttgccgatcttggctgtatcgttgggggctatctgccgccgctgttccagcgctggtttggcgttaacctcatcgtttcgcgcaaaatggtcgtcaccctgggcgcggtgctgatgattggcccggggatgatcggtctgttcaccagcccgtttgtcgctatcgccctgctgtgcgtcggcggctttgctcaccaggcgctgtccggtgcgttaattaccctctcttccgacgtgtttgggcgtaacgaagtagcgacggcgaacggcatgaccggtatggccgcctggctggcgagcacgatgtttgccctggtggttggcgcgctggcggacactatcggctttagcccgctgttcgccgtgctggcggttttcgatgtgctgggcgccgtggttatctggaccgtgctgaaaaataaaccggcggatgacgacacgacgccgctggaaacgagtaaacccgccacgcaaagttagacgcacgcgagttatcctctccgaaagccgccttgattaaggcggctttttcgtctcttcttatggtgagaagcgcgtaaaagtggtataacaaatccaatattgtcgccatctcccgggagcgaatatggaaatcactgaatcgcgtcgtctgtatcagcagcttgctgctgagcttaaaacgcgcattgaacaaggtgtctaccttgtgggcgataagctacccgcagagcggtttatcgcggatgaaaaaagcgtaagtcgtaccgtggttcgcgaagccatcattatgctggaagttgaaggctacgttgaggtccgcaaaggctccggcatccacgtcatctctaatcatccaaaacatcagcaaattgccgacgaatcgctggaatttgccaattatggtccttttgagctgttgcaggcccgtcagctgatagaaagcaatattgccgaattcgcggcgactcaggtgaccaagcaggacatcatgaagctgatggaaatccaggaaaaagcgcgtaaagagaagtgcttccgcgattccgaatgggatcttcagttccatgtccaggtcgcgctggcgacgcaaaatacggcgttagccgctatcgtcgaaaaaatgtggacccagcgcgtgcataacccgtactggaaaaaactgcacgaccatatcgactcacgtaccgtcgataactggtgcgacgatcatgaccaaattcttaaagcgctgattcgcaaagatccgcatgcggctaagctggcgatgtggcagcatctggaaaataccaagctgatgttgttcaacgaaaccagcgacgactttgaattcaatgccgatcgctacctgtttgccgataatcccgtggttcatctcgatacggccgccaacggcgtaaaatagacgttctccttctgcagggcagcgattcctccgctgcccgcaaagcctcagggtaagcaaagcatatatagtgtcagcctgtgtaaatacactcgccaccctccttcgcaatcagcaaaatcagaatgcaacaaactgcaatttctatgacgtaaagtcagcgggtttgttacaattagatgcattttgtcgttctgagagtaagctttggcttacttcacttttaaacagggaaccgttcagagcgcagtagcgaccataatctaataaaaagctatgtcgccgtgcatataccgcgttcagacgtgccgttaaccgatgtaccaggaatcgtgaatggaactattaacccaattattgaacgccttgtgggctcaggattacgaaactctcgctaatccctccatgattggcatgctgtactttgtcttatttatgattttgttccttgagaacggtttgctgcccgccgcctttttgcccggcgatagcctgcttgtgctggtcggcgtcctgatagctaaaggcgcgatgggctttccggaaacgctgctgctgctcaccgcggcggcaagtctcggctgctggctgagctatattcagggccgatggctgggcaatacgcgaatcgtacaaaactggctatcgcacctcccttcgcactatcatcagcgcgcgcatcacctgttccataagcacgggctttccgcactgctgattggccgctttattgctttcgttcgtacgctgctgccgaccatcgccgggctatcaggcctgagcagcacacgcttccagttttttaactggatgagcgggctgctgtgggttctgattctgacctcgctgggatacctgctggggaaaacgccggtattcctgaagtatgaagatcagctgatgtcctgcctgatgctgctgcccgtcgcgctgctggtgtttggcctgataggttcgctgattgtcctgtggaagaaaaaatacagaagccggggctaacaatggagatgacacgctcctctctgcgtcagataagctgggtgctgggcggttcgctactcctgtgcggcctgttctggctctggctcaccgtgcaacagcaggaatccacgctggctattcgtcccgttagtcagggtatcagcatgccggacggtttttccgtctggcaccatctcgacgctaacggtatccgttttaaaagcattacgccgcagaatgacggtttgcttatcaagtttgactccagcgctcagggcgctgcggcaaaagaagttttgggccgcgctctaccgcatggttatattatcgctttagtggaagacgatgattcgcctaccgcctggatttcgcgcctgcgcgatacgccgcacagattcgggtaatccacgaaaattccgaatatattcaccctgtttggtgatttcccggtttacttactatcattaagtttgcgggcgtcaccagactcacgttactcaactggataggggatatcctgagatattcccccacacaatggaaggtcgtatccatgaaacaccgcatcgctttgatcctggttctgtcatcactgagcgccagcgcctttgccatctccccttgccaggaaaaagagcaggatatccagcgggagatcagctacgcagaaaagcatcataaccagcaccgtattgacggtctgaaaaaggcgctgagcgaagtaaaagcgcactgcagcgacagccagctcaaagccgatcaccagaaaaaaatcgccaaacagcaggaagaaattaccgaacgtcggaacgacctgcgcgaagccgaacagaaaggcgatgctgacaaaatcagcaagcgtcaacgtaaacttgatgaagcgcagcaggaactgaaagagctgcagtctcgcgagtactaatcgattaagcaagaccaatatggaccactttaacaggagataaacatggctaaagataacgttgcagaagacctgcgtgcggaactgaagacgctggctgataccctggaagaagtgctgaactcctccacggataagtcgaaagaagagattggtaagctgcgcagtaaagccgaaagcgcgctgaaggaaagccgtgctcgactgggtgaaaccagcgatgctctcctgaagcaaacgcgagaaaccgctgcgcgtgcagatgaatacgtccgtgaaaacccctggaccggcgtgggaattggtgctgccgtcgggctggtactgggtgtcctgctgacgcgtcgttaattatggcgaactctaaaagcacgcaaggacctgggcaaagcgttttcggcatcggtcagcgaatagtcactttgctggtcgagatggtggaaacgcgcctgcgcctggtcgtcgtggagctggaagaggagaaagccaatctcttccagctgttcctgatgctcgggctgacgctgctgtttgccgcgttcgggctgatgagcatgctggtgctcatcatctgggccgtcgatgcgcagtatcggctcaacgtgatgatcgccaccaccgctatcctgctgctggcagcgctcattggcggtatctggaccttacgcaaagcccgacgttcaacgttcctgcgcttcacgcgtcaggagctggctaacgaccgcgcattgctggaggacgataagccatgagccgcgaacagcaggaacgcgaacgacaaaaagcgcttttgctgcgcctgatccaacagcagcggctggaccttagcgccagccaccgccactggattgaagcgaccgcgcccattgatcgcggctggaacaccttcctcaatctgcgttcatgggcgatggtcggcagcggcatcgtagcaatatggtccgttcgccatccgcgctttttgatgcgctgggcaaagcgcagcctcggtatctggagcacctggcggatggcacgcaatctgctgcgtcaggccacctcgcgctaaggctaatgaccgggtccggcgccagccgccgcccggcatccctcaatccccactgtccccgtcaggtttgcccctcttcttgctcaccagcagaccgctttcgcctttcagcgtctgccgtcattttgcgcagcaccgcctgtacgacccgctacagccccacttacattcatgtcctttatcaataattactcagaaactttgaagaagatctacagttttccttgctaacaatcacatctcatcctcgctaatatcctctccatcgacagcaagcccgcgtaactacgcaggattgcaccaaaaaacaaaatcgccgccctttgggttttctggagtaagaaatgaaaaaattagaagatgttggtgtactggtagcgcgcattctgatgcccattctgtttatcaccgcaggttggggaaaaatcaccggttatgcgggtactcaacaatatatggaagccatgggcgtccctgggtttatgctgccgctggttatcctgcttgaattcggcggcggtctggcgattctgttcggtttcctgacccgcaccaccgcgctgttcaccgcaggcttcaccgtgctgaccgcgtttctgttccacagcaactttgctgagggcgtgaactcgctgatgttcatgaaaaacctgagcatcgcaggcggcttcctgctgctggctatcaccggtccaggcgcctttagtattgaccgcgtcctgaataaaaagtggtaagcgcactatactagtaaataaaaaagcgaggggacttctcctcgcttttgctatctgaaggaggaaataatgggacaattagttgacggcgtctggcacgatacctggtatgacaccaaatccaccggagggcgatttaagcgttctgtgtccgcctttcgcaactggctaaccgccgacggcgcgccgggcccaagcggcgaagccgggttcgctgcggaaaaagaccgttaccatctgtacgtttctctggcctgcccatgggcgcatcgcaccctgatcctgcgcagcctgaaaggactggagccgtttatctccgtctccgtggtcaaccccctgatgttcgagaacggctggactttcgacgatagcttcccggcagcgacgggcgataccctctaccagcacgaatttctttatcagctttatctgcatgccgatccccactacagcgggcgcgtcacggtgccggtattgtgggacaaaaagcagcaaaccatcgtcagcaatgagtcggcggaaatcatccgcatgttgaataccgcatttgacggactgggtgcccgcgctggagattactacccgcctgagctgcgcgcgcaaattgatgagctgaacggctggatctatgacaacgtcaacaacggggtctataaagccggattcgccaccagccagcaggcctatgacgaagcggtcgatggggtatttacgtctctggagcgtctggaacaaatccttggtcaacaccgcttcctgaccggtaaccagctgacggaggccgatattcgtctgtggaccaccctggttcgtttcgacccggtgtatgtgacccactttaaatgcgacaaacgccgcatcagcgattatctcaatctttatggcttcctgcgcgatatctaccagatgccgggcatggcggaaacggtggattttgcccatattcgcaaccattactaccgtagccataagacgatcaacccaaccgggattatctccgtcggcccgcagcaggatcttaacgaaccgcacggccgcgatcttcgcttccgctaatccgttgggcgccatttaccgcgcccaataattcacaaaacaaatatttaccagcatttcattcacgtctattcttatttcgatcgctttaaaaacaagtgattgacggttaatcgaggcgtaaaaatggactggtatcttaaagtattaaaaaactacattggatttggcggccgcgcccggcgcaaagagtactggatgtttattctggtcaacatcatcctgaccggcgtactcagcattattgataaaatgctcggatggcagcgcgccggaggggaaggcattctgacgaccatctatggcgtgctgatattcttaccgtggtgggcggtgcagtttcgtcgattgcacgacaccgaccgctcggcatggtggctgttattgctgctgatccccgtgatcggctggctggtgatcctggtcttcaattgccagaacggcactcccggcaataaccgcttcgggccggacccgaaaccgacctcttactgaccatgcgcccctcgtcaaaaaggggcgcattttgttttatctggccataaatagcttcgggatttcccgcagacaccatgattttgcctcacccatgctgtcccggcgccaggccataataatgtcgatctcgttgctgtattccgggctgaccacccgcaggcgcccttcggcaatatcccgctcaaccagcggatagggcatcgtggcgacgcccaaccctgccagcagcgcctggcgtttatcttcgatcgagctcacggttaatcgcggctgtttatcaagcagctgcaccgtcagcaccggacgttcgcgggcggtgtccgccaccgccacgccgcgatacttcacgcgcgtgacttcagaaagcggctcaggctcgaggtgaatgggatggtcgggggcggcaacgtagacgctcataaccgagtagagcttacgggagttaatttccgaggaggaacggaaatgcatatccggcgcaacgacaatatccgcccgcccctgctcaagacgctcccatgctccggccagcacttcggtaataatcgacagctgggtgttcgatttggtcgcgagcttttcaattagcggaaacaggtcggtggtaggtaccagcgcctcggtgacgatggtcaggtgcgtttcccagccgcgcgatagcgcttcggcatcggttgtcagcttatccgccgcttccagcagaacgcgcccgcgctcgagcagcattcggccaacgttggtgaattttgttcgatgacctgaacggtcaaacagaacgacatccagctcttcttccagcttttgcatggtatagctgagcgctgaaggcacccgaccaagctcatcagccgccgccgcaaagcttccgcgccggtcaatcgcatccataacgcgtaacgcttccagcgttaatgctctctctttagccatcgttctctcattcaggaaatttgaacataccgggcagaatatctggctaacaatacagcgtccatacctttaccattgatttagtgtaaagagaggtcaagaagatgattacaacccgaacagccaaacagtgcggtcaagccgacttcggctggctgcaggcccgctacaccttttcctttggccactacttcgacccgaaattgctaggttacgcgtcgctgcgcgtgctcaaccaggaagtcctggcgcccggcgcgtcgttccagccgcgtacctatccgaaagtcgacattctgaacctgatactggaaggtgaagcggaataccgcgacagcgatggcaaccatatccaggctaaagctggcgaagcgctgctgatatccacccagcccggcgtgagctacagcgagcacaacctgagcaaagagagctcgctgacgcgaatccagctgtggctggacgcctgcccgcagcatgaaaacccgctggtgcaaaaaatcgctatcgccgagggagcgcagcagctgctggcttcgccggacggcagccagaacagtctccagctgcgccagcaggtatggatccaccatatcaatctggcgaaaggcgagcagcttaacgtgcagctccacggcccgcgcgcctacctgcagtcgattcacggcacggtacatgcgcgagtgcaggaagaagagaaacaggctttgacctgcggcgatggcgcgtttattcgtgacgaagctaacattaccctcgttgccgatacgccgctgcgcgctttgctgatagatttacctgtgtaacaacggcagtaagggagtgtgtcagtgggcaagaagaaaacaaaaaaagcggtgctggcagcatcgcagccgcagccagaaaccatgacaacggttagctttggttatgaagagatgttgagcgaactggaggcgatcgtcgcagaagcggagatacggctccaggaagaagaaagcgtcgcctgacgtcaatatcggccccggccggggccgatagatttactcactcagcgcctgagctaaatctttttggacctgcttacgctgttctggcgtcaggacctgattcacatcaaaatagtacttcacgcgataatagcggacctgctgttcgactttactaaacgccgccagctgatctttgaccgctttttcattccattttccggaatcaatcacatcaaataatacgccgtctttaatatccttctgggagatctgctgaacgtttttttccagctgctggtgcaggcttttaattttcgttacctgatcctgggtcaattttaagtgttggacaatcggatcctgcgccggggctggcgcagcgttaacatccgcagcctgtgccgccattgagaagcccgtagcgaggacggttgtcactgcaatgcgagtcattaatttcattttttgttttatcctgattaattatcaccgatgtggctggctattatttttcataagccgatgacgaaatgtaaaaaatagttcgcataaatgtagttaaatcaggagatacataataaacatgaatgctataattgaattcatttattttaaatatattaattaagcgagaaggacgcataaccgcatgagtcataatgcggttgatggcagacctgtttcctccattgtgccgctttcttttggggtatagcgtcgtggactggcattcatctgccctgtgtttcaacctgccgtatgaagcaaaaacccccgccattgctgacgagggttttctttgaatgaggaagctgaccgttaagccgggttctgtcgtggacagtcattcatctaggccagcaatcgctcactggctcaagcagcctacccgggttcagtacgggccgtaccttatgaacccctatttggccttgctccgggtggagtttaccgtgccgcgaactgttaccagacgcgcggtgcgctcttaccgcaccctttcacccttacctgatcccacttgcgtgggccatcggcggtttgctctctgttgcactggtcgtgggcttgcgccccccaggcgttacctggcaccctgccctatggagcccggactttcctcccctccgcccgtctcccccgaagaggacgacgacgaagcggcgactgtctggtcagcttcggcgcgcagtatagagggtttaccgacggttgtcatccttccgtcgccatcccaacctgcaatgtcgccgcaatattacgcgacgcatgataaatattgtccgccgcgccgcgaaacgcctcttcgagcgtcgttacgctggtcagtacgctaaacaccgcatcaatcccatactggtgaaccacgccgacgtcccgggtcagactaccggcaatgccaattaccggcttatgatactttttcgccacgttcgccacgccaaccggcactttaccgttaatactctggctatccagccggccttcaccggtcaccaccagcgaacaatcgaggatatgctcttccagattcagcgcctgggtcacgatttcaatcccgctgcgtaattcagcgttcaggaacgccatcagcgctgcgcccataccgcccgccgcgcccgcgccggcaacctgcttcacatcgacatgcagatcggccttaataacgtccgcatagtgcgccaggttgctgtccagctcgcggatcatcgcttcggtagcccctttctgcggaccaaatatccttgatgcgccagtatcgccagtcagcggattggtgacatcgcaggcgacccgaatagcgcaatcatgcagtcgcgcatcaagaccggagagatctatcgaattgaggctacacagactaccgccgccgttgccaatctccacgccgttggcatcgcagagacgcgcgcccagcgcctgaaccatccccgcgccgccgtcattggtggcgctgccgccaatgccaatgatgatatttttcgccccatgatccagcgcctgcaaaatcagctcgccggtaccgcgcgacgtcgtcaatagcgggttacgctgagcgggcggcaccagccccagcccgctggccgcagccatttcgataaacgcggttttgccgtcgccggagagcccccagcaggcattaaccggaacacccagcggccccgtcacgcaggcgctcatttcggttccctgcgtcgcggcaatcatcgcctcaacggtaccttctccgccatcggcgagaggaaccttcacgtagagcgcatcggggaaaatttcccgaaaacctttttctatagcctgagcaacctcggtggccgagaggctttctttataagagtctggggcgattacgattttcatagttatgtagcctgacagtgccgcgcgaggcaagaattacagggcgcgcatccgcgcccttcttgttagcgagtgacttccactttcgccagtttttcgtagtagcatgcaagcgcgctgtggtcggcggtacccaaaccgtcggcgcgcagcgcctgcatcatctccatcaccgcggcggtcagcggcagctgggcgcccacgccgtgagaagtgtccagcgcattcgccagatctttgatatgcagatcgatacggaaacccggcttgaagttgcggtccatcaccattggcgctttggcatccagtacggtactcccggccagcccgccgcggatggcctgatataccagatccgggttcacgcccgctttggtcgccagcgtcagcgcttcggacatcgccgcaatgttcagcgccacgatcacctggttggccagcttggtcacgttgcccgcgccgatctcgccggtatgcaccaccgaacccgccatcgctttcagcagatcgtaatatttgtcgaaaatcgctttatccccgcccaccatcaccgacagcgtaccgtcgatggccttcggttcgccgccgctgaccggcgcatccagcatatcgacgcctttcgctttcagcgcttcgctgatttcgcggctcgccagcggcgcgatggagctcatatcgatcagcacggtgcccggcttcgcgccttcaataatgccgccttcacccaacgccacctctttcacgtgcggggagttcggcagcatggtgatgatcacatcgcactgctcggcaatcgctttcgctgacgcggcggtttctgcgcctgcggcaatcacttcggcaatcgcttccgggttacggtcagcaaccaccaacgagtaacctgccttgaggaggtttttactcattggtttacccatgataccgaggccaataaaaccaactttcattgtcatgtctttatctctctagtttcggtggtggttatttcttaaaggagtcagccagcttctgcgtggcagaacggaaaacgcccaggtcgctgccgacggcaacaaaggtcgcgccccattccagatagcggcgcgcgtcggcttcaaccggcgccagaatgccgctcggcttaccgtgctttttcgcgctggcaaaaatgtgctggatagctttctgcacttccggatgggaagcattgcccagatggcccagcgcagcggccagatcgcttgggccaacaaaaataccgtcaacgcccgtcgtggcggctatcgcatcaacgttatccacgccctgctggctctcgatttgcacgaggatggtgatgttgttgttcgactgcgcgaagtaatccggcacggtgccaaacatattggcgcggtgcgagacggatacgccgcgaatgccttctggcggatagcgggttgaggcgacggcgttaaccgcctgctcttccgtttcgacaaacggaatcaggaagttataaaaaccgatatccagcagacgcttaataatcaccggctcattggtcggtacgcgaacgaccggcgcgctggcgctgcctttcagcgccatcagctgcgggataaaggttgagatgtcgttcggcgcatgttcgccgtccagtaccagccagtcgaaacctgccagacctaaaacttcggtgctaatcgggctcgccagcgcggaccagcagccaatctgaacctgatgcgccgccagggccgccttaaatttgttcgggaagatatcgttgttcatcgtttataccttgtcacttaaccgttaattatttctgcagttccatgcgtttgatgtcgccgaccacaaacagatagcaaaccatcgccatcagggctgagcatccgacgaagaccagcgctgcgttgaatgagtgcagctcgctcaccaggtaaccgataaccagcggggttacgatggaagcgacgttaccaaatacgttaaagacgccgccgcacaggccgacaatctctttcggcgcggtatcggaaatcaccggccagcccagcgcgccgaaccctttaccgaagaaagccagcgccatcagggtcaccaccagcgcggtgttatcggtgtagttacacagaatgatggtggaagccagcagcattccgaggacgatcggcagcttacgcgccacggtgatggaaaaaccgcgtttaatcagatagtcggagaacaccccgcccagcacgccgccggcaaaaccgcacagcgccggaatcgatgcgaccagacccactttcagaatcgacatgcccttttcctgcaccagataaatcgggaaccaggtgaggaagaaccaggtgatggtattgataaaatattggccgaagaatacgcccagcatcatgcggttggtcaacagctgcttgatatagtgcagtttaggtccgctggccgccgtgctgccgggctttttatggtccatatcaacgacggcgccgttctcggagataaacttcagctcctcctgcgtcatgcgcgggtggtcggtggggttgtggatcagttttatccacagaccggtcagcacaaagccaatcacgcccatgacggtgaagacgtgctcccaaccccaggcgaaggtcagccagcccagcagcggcgagaacagcgccagggagaaatactgcgcggagttaaagatcgccgatgcggtcccgcgctctttcgtcggaaaccacgccgcgacgatacgggcgtttgccgggaaagatggcgcttcagagaaacccagcataaagcgcataaaaaacattgagatacccgcccacgccagtggaaacatatccacaaagccttgcaggaaggtaaacagcgaccagaagaacaggctgtaagagtagactttcttcgagccaaatttatcgagcagccagccgccggggatctgcatcagcaggtaggcccagccgaaagcagagaaaatatagcccatcgagaccgcgctcagctgcagctctttcgccacctctgtaccggcgatcgagagcgtcgcccggtcggcatagttaacggcggtaacaatgaaaatgatcaacaaaattaaatatcgagttggcacttcctttttctgttctatcgttgcatccagactcatctaatattcctcaggtacaacacaccttccattatttattttggtgtgattatttattattcagaaatcaatatcagaaggtatcgatttacttatccggcgcattgcaagcatgactcagtataatcagcttgcgagcgttaaacactgtgcatataacctgtaaatggcgtttaattatcgttattgttgtgcaaatgcaataatcagtgggcgctgttccacagttccagcgatttccctctttaacgtattcgcccgcgcagcaatgggtgatttagatcacattttcagattcaaacacctgacattctctatttcacaaatctgcacatcagaaattgaatataccctaaatatttcgagttgcatgaaggcggcaacgcagggaatccccatgagcttactaaagtaagtgactggggtgagcgaggaaatccagcgcacatgcagcttgaaatatgacggatataaacgttttattttattattcgcaccttgctggagaatactggacaatggctgacattgaaattagacaagaatcgccaacggcgttttatataaaagtagacgaaacggataacgtggcgattattgttaacgatcgaggtttaaaggccggaacgcgtttccccgacgggctcacgctcgttgaacatatcccgcaaggccacaaagtcgcgctggtcgatattcccgtccacggtgaaatcatccgctatggcgaagtgattggctatgcggtacgcgatattccgcagggcagctggattgacgaatcgctggtcgaactaccgaaagcgccgccgctgcataccctaccgctggcgaccaaagtcccggcgccgctgccgccgctggaaggctataccttcgaaggctatcgcaacgccgacggtagcgtgggcaccaaaaacctgctcggcattagcaccagcgtgcactgcgtggcgggcgtcgtcgattacgtggtgaaaattatcgaacgcgatctgctgccgaagtatcccaacgtcgatggcgttgtgggtctgaaccacctgtatggctgcggcgtggcgattaacgccccggcggcggtcgtcccgatccgcaccattcataatctggcgctcaatccaaacttcggcggcgaagtgatggtgattggccttggctgcgaaaaactgcagccggagcgcctgctggaaggcaccgacgatgtgaaaagtatccccgtggatagcgccagcatcgtcagcctgcaggatgagaagcacgttggttttaaatcaatggtggatgacattctgcaggtcgccgagcgccacctggagaagctgaaccagcgccagcgtgaaacctgcccggcctccgagctggttgtcggtatgcagtgcggcggcagcgatgcgttttctggcgtcaccgccaacccggcggtgggctacgcatccgatctgctggtgcgctgcggggcgaccgttatgttctcggaagtcaccgaagtgcgcgatgcgatccacttgctgacgccgcgcgccatcaacgaagaagtcggaaaacgcctgctggaggagatggcctggtacgataactatctcgatatgggcaaaaccgaccgcagcgccaacccctccccgggcaacaagaaaggcggcctggcgaacgtcgtcgagaaagcgctgggctctatcgctaaatccgggaagagcgcgattgccgaagtgctctctccggggcagcgcccgaccaaacgcgggctgatttacgccgcgacgccggcgagcgactttgtctgcggtactcagcaggtggcttccgggatcacggtgcaggtctttactaccggtcgcggtacgccgtacggcctggtcgccgtgccggtcataaaaatggcgacgcgtaccgagctggcaaaccgctggtatgacttaatggatatcaacgcgggaaccatcgccaccggagaagaaaccatcgaagaggttgggctgaagctgtttgaatttattcttgatgtcgccagcggccgcaagaagaccttctcggatcagtggggattgcacaatcagctggcggtgtttaacccggcgccggtgacgtgatcgaatcagcaatttatcccgctcgtgatgcttcgggcgggatacctctgctattgatgcgcgttaagaaaggcctctatctgcgccttcgtggacgttccctccatcgggccacggcgggaaatcgccagagaaccgctggcgttggcccatctcagtgcctcctgcggcgatgcgccggacaggaacaggctgacaaaggtcgcaccgaagcagtcgccagctcccgttgggtccacgaccgggacatgaaaaccggcaacatgatgcatttcccgggcgctgaaatagctcgctccgcgcgggccgcgtttaatcaccacgtgcttaacgccgcgctttaaaagcttatccaccagcacctgttcatcgcgccccgggttgaggccaaagtaatccagttcgccatcgctgggcaaaaagatatcagtgtaatcaaggatatactcaaaggcctgcgacatttcagggatattaagcatctctttacggatattcggatcgaacgaaaccgtgccgttgcgcgctttgatattttcaatcgctttacgcatcgcgtcgatcatgcgaaacgaaaacagcgaagagcccataatgtgaaaatggttgcactggctaagcagagtatcgtcaatatggtcagcggttagcaggccgcaggcgctgttcggcatattaaaaataaaatcgcgctgcgcctggctgcggtagctcacaaaagcgctgccggtggtcgccttctgcagtatggcgatgccattaatattcacgccgtcgctttccagccgcgcgatattcatttcaccaaacgcatcgttgccaacgcagctaaaaagcaccgaccctaaccccagctttgccacctgatcggcgaaaattgccggcgcgccgctgggatatggcccccaaaactctcccgggcgcgaaaagccctggttctcttcttttgccagaaactccaccagtagttcgccgatggtgcaaatggtcacattcatcatcgctcctttactttgccttttgcaaagcagggttgagccatgtcaggcactcgttattggtatagctgttagtcaggccagcggcgagaaggcgggcatgatactccgcggcgacaatctgcggcgtcacgatgccgctaatttgctgcaaatcgccaatcgggtagcgcttgtcgccatacaccggacgatgcgcgacgaccgcaatcgccctctcactttgcgccaccgcttcgctcagcaggcgggcgctggcttcctgtctgacgcttaaggtgccatcttcagcaatgtggtcgacagcgatcagcgctcgcgagggacgataatgacccagcgcgctcagcgccagatcgccttcgactattttgccgctactccccaacacaccgccgagcagcacggtttctccattcaggaactcctgcgccagcggcacatgcgccaggtcgtttaatagcaggcagagctcgtcataaccggcaaggaaagggatcactttgcgtaagattgatccctgccccaggaacagcgtttcgctatcttcgatctgcgcagcgatctggcgcgccatttcggtctccagcgctttgtccgtggcaaccggggcttcctgagccagggcgaccggagcgccggcctgggaagtgtaaattgcgccgccaaacgagcgcttaaggtagccctgctgttcaaggtagttcaggtcattacggatcgttaccccagatacagccagcatttcagccagatcgtcgactttgatctctccgttcttgcgcacgatctccgcgatgtccaggcgccttttcagcagacttgtagacggttttgccacagtgttgtgccttcttattttctcccagaataactttcatttttaaatttccccgctgcattgtcaaacgcaaggccttccatacctgtttcacgtcgatttaaaaacatttaattcagtaagttacataaaacatcgtcatttaagatacttttaaaaaagaaaacaaacaagactatataactttcatttttaaaattacatcactgttgtgtgcgattgatcacaacaatacgtcgagacgatcgctacattactttcaaaatgaagattcaaaacacaaaagtacttacaacatgaaagtaaaggagaacgaatgtacattatttcgagtaaaaacatgctgttgaaagctcagcgccacggctatgccgttcccgcctttaatatccacaacctggaaacgatgcaggtggtggtagaaaccgccgccgaactgcgttctccgctgatccttgccggcaccctgggaacttatagctatgcaggaaccgggaacgtggtggcgatcgctcgcgatctggctaaatactgggatcttcccttagcggtccacctcgatcaccatgaagatctgaccgatatcatgcataaagtgcaggccggtatccgctcggtcatgatcgacggttcacactcgccttttgaagaaaacgtcgcgttagtcaagagcgtggttgaactgagccatcgctatgatgccagcgttgaagccgaactcggccgtctgggcggcgtggaggatgatttggtggtcgatgcaaaagatgcgctgtataccaacccggaacaggcgcgcgaatttgtcacccgcaccggcatcgactcgctggcggtggctatcggtacggcgcacggcatgtacgccgcagaacccaaactcgattttgagcgcctcgccgccattcgcgatcgcgttgacgtccctctggttcttcatggcgcatccgggctggccgatagcgatatccgccgggcaatctctctgggcgtgtgcaaagtcaacgtcgctaccgagctgaaaatcgcgttctccgatgccctgaagcagtacttcgaggaaaatccggacgctaacgatccgcgtcattacatgaaaccggccaaagcggcgatgaaggatatcgtacgcaaagtcattcacgtttgtggctgtgaaggacaactgtaattttcggatcgaaggagcaatgtcgtgatccataccctgacactcaatacggcaatcgatatgaatatcttttgcgatccgctgaagccgtcggcagtgaaccgaacccggcacaccgaatattgcccgaatggcaaaggagtgaacgtttcgctgatattaaatcactatcagcaacccactcacattatgggtattttcggtggtttcactggccgttatatcgtggaagagttacgtcagaaaaaaattaaagtgacgccgacatgggtatctgagccaacccgaattaatatttttataaatgacggcgcagaggaatataagctcgttaaccccggtgcaaaaattgatgacgagtgtaaacagcaggttattcatcatctgcaatgcgtcacctccggggattatttagcgatcagcggcagcctgccgccgggaattgaaagccggttctatagcgagatcattgaattatgtcagcagaaaggctgcgagattatcctcgatatcagccatccggttctgcgccagctgctggaattacggccattgttgatcaaacccaacgatgacgagctgcgggaaatatttggtctcgacgtcagcaaccatcagcaggtacgcgaagctatgcgtaccctgcatcagttgggcgctcgcaacgtgctgctgacgatgggcgcggagggcctttacttttccgatggcgcaagcgtgtggttttgctccgcaccgaaaattgaactggtcagctccgcctgcgccggcgacgccgcgctgggcgcctttctcagtaaatggattaacgaagacgatgtcgctcacgccctggcactagccagcgcgaccggcgccgacgtcgccggttccgccggattaggaaatttacaacgcacagaagaattattacagcaaattcaggtcgttcaattataaaggtccgattatgaaaaaaattattgcagttaccggctgccctacgggtattgcgcatacttttatggctgaagaagccttaaaaaccgcagcgaagaaattaaatgtcgacattaaagtggaaaccaacggggcttccggcgttgaaaatgccattacccccgcggatttagaagatatttatggtgtaattattgccgccgataaagacgttaacgccgagcgatttaatggtctgccggtcattgaggttccggttaaagaagccattcatcatccggtcgatttaattaataaagtgatcggcggccaggcgtcgcgccgtcagggtatttcttcctcgccggagtcaccggagaaatacgcgcaagagtctttcggacgccaggtttataagcacctgatgagcggcgtgtccaacatgctgccgtttgtggttgccggggggattttaattgccatctccttcctgtggggtatctactcagccgatccgaactcgccgcagtataacgttattgccgcgacgctgatgaaagtaggccagcaggccttctcaatcatggtgccgatttttaccgcttatatcgcctggtctatttccggccgccccggtatggttgcgggcttcgtcggcggcttactggccaacgcgaccggcgcaggctttctcggcgggattatcgctggtttcgccgccggttattttatgttgctgatccgcaatatgctcaacggcctgccgcgtcagtatgaagggctgaaatcgatcttcattatgccgctcgttggcgtgctggtaataggcgtgatgatggtgctgctgggtcaacctgtcgccgccatcaacaacgcgatgatgaactggctgagttcattacaggaagcaaacccgattctgctgggcattgtggtaggcgcgatgtgctccttcgacttcggcggtccggtgaataaagccgcctacgtcaccggtacgctgctgcttggccaggggaactacttctttatggccggggtttccgccgcctgtattacgccgccgctggttatcgcgctggcgacaaccttcttcccgaaaggcttcagtgaagaagagcgcgccgccgggatggtcaactatatcctcggctgcacccatattactgaaggcgctattccattcgccgcgaaagatcctttacgcgtcatccccatgatgatgatcgcctcttccatctctgcgattctcagctatagcctgcaaatccaggttcctgctccgcacggcggcttcctgatcctgccgctggtaagtaaaccgctaatgtgggtgctgtgtattctcgccggttccgcctgcggcgcggtcatgctgggatgctggaggctatggcaaaaacggacccaggaagcagcgacgcttgccggtgccattaaataaggagctatttatgcaactgacttgcgcagatatccatttcgatcgcgcgatcaaaacgaaagatgaagcgctgcaacgcgtcgttggcagattaaccgaagccgggcataccacgcccgcttatctgaacggcatgcgcgaacgcgaaggacaaatcagcacgtatcttggcaacggtattgccattcctcacggcacgccgcagagccgcgatgcggtactgaaaaccggtgtcaaagtactggcttgcccgcagggggtggattggggagaagaacaagcggcttatctgattgtggggatcgccgcgcaggacaacgaacaccttgatattcttcgccagcttacccacgccctgagcgacgaacgcgtacctgcagcgctatcgcgcgctgagagtccgcaggcggtgctggagattctggccggcaatatcttcccggccgaaggggaagagatggaaccgcccccggcgttcgatgaagaggcgacttttaccctgcgcaatccccatggactgcacgcgcggccaagcgctgtactggtgaaagcggtgaagcagtggcgatcgcaaattcgggtggaaaatctcgacacccgttccgctattgttgacgccaaaaatctgatgcgggtggtttctctcggcgcaaaacagggacatcggctgcactttatggccagcggggaagatgcccatcaggcgctggaggctatcggtacggcctttaatgccggattaggcgaaattgccgctcaaccgcagcaggtcgttcagccagcagaaaagcctaaacggagctggatttcacgaatatttagttaaatttcaataaattaaaaacgctctgccgtcatcgccagagcgtttttttatctttaactttcgtaacattacgttttatctttctttttttcgagattgatcacaaatcaaaacaaaggagtttgcgggcaaaacaaaacataacgaatatattcgaaagaaaacggaggttttaaatgaaagatattatttcccgccacaaagctggcgaacacatcggcatctgctcagtttgttccgcgcatccgctggttatcgaagccgcgttacgtttcgatctgcataccaacaacaaggttcttatcgaagcaacctctaatcaggttaaccagtttggcggctacaccggaatgcagcctgcggacttccgtgatttcgtgaataaaattgcccacgaagtcggtttcccgtcagatcgcatcatccttggcggcgaccatctcgggccaaactgctggcagggcgaacccgccgccgaagcgatggaaaaatcggtcgatctgattaaagcctacgtcgccgcgggcttcagcaaaatccatctcgatgcctcaatgtcctgcgctgacgatccggtaccgctggacccggccgtcgtcgccgaacgtgccgctcgcctgtgccaggccgcggaagagacggcaaccgacgcgcagaaacgccatctgacctacgtcatcggcaccgaagttccggttcccggcggcgaagccagcaccatcggcagcgtccacgtaacccgcgcccaggatgcggcggcaacgctggaaacccatgaagccgctttccgcaagctgggtcttaacgcagcgctggaacgcgtcatcgctatcgtggtacagcccggcgttgagttcgaccatacgcaaattattcattaccagccagaggccgccaaagcgctctccgcgtggatcgaaggcacgccgatggtctacgaagcgcactcgactgattaccagtctcgtcaggcctaccgggcgctggtgcgcgaccattacgccatcctgaaagttggcccggcgctaaccttcgcgctgcgcgaagccatttttgccctcgcgcaaatggaaaatgagctgatcgctccggaatcccgcagccgcgtgatggaagtgattgatgaagtaatgcttaacgagccgggctactggaagaagtactaccgcccgacctggagccaggcaatggtggatatccacttcagcctgtccgatcgcattcgctactactggccgcatccgcgtattcgccagagcgtggaaaagttaattgcaaacctgaccgaaactaagctgccgctgggccttatcagccagtatatgcccgtgcagtttgaacgactgtcgttaaacgaactcgccgccgtgccgcacgacctcatcctcgacaaaattcaggatgtgctgcgtgcctaccgttacggctgttcatccgaaatcgcctgaagtaaagaggatttatgagtcaattgtttgttcgtaccggcattcattttagttccagccggcaggcgctggagcacattggcgaagagatgctggcgcgcggcgttgtgcacgacagctatccactggcgctgctcgaacgagaagcaactttccccacaggcattgcgctggagcagcacgcggtcgcgattccccactgcgaggcggtacatgcgaagtctccggctatctacctgattcgcccggacaacccggtcccttttcagcgagctgacgacgacggcgaaatcgacgtttcgttaatcatcgcgctgattgtagaaaatccgactgcacagctacagctgctgcgccggttatttagtgagctacagaacccgaacacgcttgaagcattgctggctgcctcacaggagcagctgcccgagctgtttcggcactctatccttgagtcagagcccagcgctcaggctttataacagactgataataaaaggggtaccctatgaaacgtaaagtaatcgtcgcctgtggcggcgctgtcgccacctcgaccatggccgcagaagagatcaaagatctgtgcgcggaccacagcatcgagctggacctggtgcagtgtcgggtgaatgaaatcgaaacctatatggacggcgcgcacctcatctgcaccaccgcccgggttgacagaacctttggcgacattccggtggttcacggtatgcctttcatttctggcgtaggcattgaagaactgcagcaaaaaatcctgaacatcctgacggagtaacgcccatgtttagcgaaatcatgcgttatatcctcgaccttggtccaacggtgatgctgccgatcgtgatcatcatcttctccaaaatactggggatgaagctcggggactgttttaaatcaggcctgcacatcgggattggtttcgtcggtatcggcctggttatcggcctgatgctcgactccatcggcccggcggcgaaagcgatggcggagcatttccagattaacctgcacgtgattgatattggctggccggggtcgtcgccgatgacctgggcctcgcaaatcgcgctggtggcgattcccatcgccatcgcggtcaacattttcatgctggtcacccgaatgactcgcgtcgtgaacgtcgacatctggaacatctggcatatgacctttaccggcgcaatgctgcatatcgcgaccggttcttactggattgggattcttggcgtagtggtgcatgcggctttcgtctacaagctcggcgactggtttgcgaaggatacccgcgactttttcggcctcgatggtattgctattccgcacggtagctcggcgtatttagggccgatagcggtgctggtcgatacgattatcgaaaaaattcccggcctgaaccgcatccacttcagcgctgacgacatccagaaacgcttcggtccgtttggcgaaccggtcaccgtcggttttgtaatgggtctggtcatcggcgcgctggcgggctacgacctgaagggcatcctccagctggcggtgaaaaccgcggccgtcatgctgctgatgccgcgcgtcatcaaacctatcatggatggcctgaacccgattgccaaacaggcgcgtaaacgtctgcaggcgaagtttggcggccaggatttcctgattggtctcgatccggcgctgctgcttggtcatacctcggtcgtatcggccagcctgatctttattccgctaactattctgatcgcggttgtggtgccgggcaaccaggtcctgccgttcggcgatctcgcgaccattggattctttgtcgccatggcggtggcggtacaccaggggaacctgttccgcacgctgatttccgggatcatcctgatggggataacgctatggattgccacgcagaccatcggcctgcatacccagctggcggctaacgccggggctctgaagacgggcggccttgtggcctctatggaccagggcggttcaccggttacctggctgctcattcagctcttcacctggcaaaacgtggtgggttttgtggttatcggcgtcatctatgttgccggcgtgctgttgacgtggcgtcgggcgcgcagcttcgccgccgcagagaaagccgccgtcgcgcaacaaagcccgggcgtttcttaatctcaagggggagcatccgctccccggacatttctggagaatattatgcaatcagtggttatccatgctgaggggacagtgcgcgttgaagaacgcccgataccgactctacaaacggaaaacgatgtcctggtcaaagtcgtcagctccggattgtgcggttccgatattccgcgcatcttcgccaaaggcgcccactactatcccatcaccctgggtcatgagttcagcggctatgttgaatcttacggctcagcggtgaccgacctgcagccgggcgacgcggtagcctgcgtgcctctgctcccctgctttaactgcccccagtgccagcgcgaatacttctctctctgcaaacagtaccagtttgtcggttcgcgcagcgaaggcggaaatgcgcagtacgtggtggtcaaacgcgccaacctgttccgtctgccggaccagatgccgattgatgacggcgcgtttattgaaccgatgaccgtcggcctgcacgccttccatctggctcagggctgcgaagggaaaaacgtcattattattggcgcaggcacaatcggtttgctggcgttgcagtgcgcccgcgaactgggcgccaaaagcattacggcaatcgatatcaacccgcagaagctggcgctggcaaaaacgctcggcgcaacgcacgtctttaacagcaaggagatgagcggcaaacagattcaaacggcgctggaagagattcagttcgaccagctggtgctggaaaccgccggtacgccgcaaaccgtggcgctgggcattgaggtcgccggaccgcgcgcgcagctggcgctggtgggtaccttgcaccatgacttaacgctgcctttcgccacctttggccagattcttcgaaaagagctgactattgtcggcagctggatgaactactcgggcccgtggcctggaaaagagtggcaaacggcggttcgcctgctgacggaaaaacgcattcagcttgccccgcttatcacccacatcggcgatgccgaaagctttgcccgcgaagtccaggcgctcaacggtgcgccgatgcaggggaaaatcctgcttaaactctcctgaccaactgagccagcaatcagagctggctcacataacctttcgaaaattatcgttcaactttcattacccttcgattacactaagatcagttaattatcaggcaaattaatatgaactcattcgagcgaaggaataaaattgtcgaaatggtcaatgcgcagggtagcgtattggtgctggacctttcgaatctctttggcatctccgaagtgacaatccgggccgatctccgtttactggaagaaaaagggttactcacccgctttcacggcggtgccgcaaggcccggcagcaatttgaccgaaggagataatctggaagtggtgcttgaagatcgttatcagttggccagcgatccgaaaaaacggatagcccaggccgcggcggcgatgattagcgaaggcatgacggtgatcctggatagcggcagcactaccctactgattgccgaggcgctggtacgtatgaccaatatcacggtgattaccaacagcctgcccgcggcgtttacgctatccgaaaacaaagatatcaccctggtggtctgcggcggcaccgtacgccacaaaacacactccatgcacggtaccatcgccgaacgttctcttcagggcatcagcgccgatctgatgttcgtcggcgcagacggcatcgataccaccaacggcatcaccaccttcaacgaaggttactccatcagcggcgtcatggccgccgcggcacataaggtcattgccgtgctggacgccagcaaattcaatcgccgcgggttcaatcaagttctaccgatggagaaaataaactgcgtgattaccgacagcgaaataaatgaagaacatcggaaggcattaaaaagtaccgggattgagttacacatcgtatagaaaataaggcagatgcggtgacatctgccctattgaccatcacgttttgtacgctgataacccgctaaagaatgcgccaggctccccttttttttgcgccggtccgctgtaatcttcccttttgctgcagcgtcttcagataccgctcaacggttctggcagaaacatctatttcctgagccatgtctttcgcggtgcgcgtgggttctttagacaaaagcttgaggatccgttcctcaacggccgccagcatttccactttttcttccgacatttcttccgacagagaagctgtttgtcctatgccatctttcaacgcgataaccatattttccagcataaattcaataaacggcgtgctgtcactctggctatcacacatccctaaaacctggtaatagcgctcctgctgataatgcatcaacgtttcaactggtagccaggcaagctccgcgcgccattggctaagaattaaggtttgccacaggcgtcccattcggccattaccatcggcaaatggatggataaactcaaattcgtagtggaagacagctccagcgataagcggatgaatgtcagtgactttcagccatagcagcaactcgtttatcaaacgctcgacctgagaggcggggggagccatatgaaccagtctggtatcccggaagatccctaaatcaccgtcacgcagctggccggggttatcaaccagccctatcatcagcgtccggtgggcggtcaaaagatcggttaaccggtggcttttccatgtaggcattttttcatatgccagaagagcgtttctcacttcctgaatatcttttgctggcgcaagaacacgtttaccctccactagcgcagtgacctgatcggtactcaggctgttatgctctatcgccaaagacgcctgaatcgtacgaatacgattctcttttcgcagaaggggggaggctcgtcccgtttgagctgaccagtgccctaacagctcaccaatctcaacaaccagattgagaatggcaggagtaatgctaaacggcggctggtaatgactcatgagattagtctccctgctgctccagggcatacttatacagggcgtttttcttcacgccgtggatttccgcagccagcgcggcggcttttttcagtggcagctcagcctgcagcagggccagcgtacgcagcgctaccgccggcagcgcctcttcctgcgctttaaaaccttctacgatcagcaccatctcgcctttacggcgattttcgtcctctttcacccatgccagcagctcgccgatcggcgctccgtgaatcgattcccaggttttggtcagctcacgtgccagcaccacgtagcgggactcccccagcacagcgcagatatcctccaggctttccagcaggcggtgggtagactcataaaaaataatcgtccgcggctcttcttccagcgccttcagcgtgtcacgacgccctttggatttggcaggcagaaagccttcatagcagaagcgatccgaaggcagacccgccgcgctcagcgccgcaatcgccgcacaggggccgggcagaggcaccacgcgaatattagcttcacggcaggtgcgcaccagatgatagccgggatcgttaatcagcggcgttccggcgtcggaaaccagcgcgatgttttgccccgctttaagcttcgccaccagcgtttccgccttttgctgctcgttgtggtcatgaagcgcgaataaacgggcgttgatcgcaaaatgctgcagcagcaaaccggtatggcgggtatcttccgctgcaactaaatcaacggcttgcaacacttccagcgcgcgttgcgtgatatcagacagattccctatcggagtgggcacaatatagagctgtccctgagaattatctgctgattcgtgttgtttcattgtctcgtccgtattgccgaattaatattgagcattgagccaaaaaaatatcactggacacatatggtaccgtcaacatttcttcgttctaaacccgtgcgttgtctgcccgtactgctggccgcgctgatctttgccggctgcggtacccatactccggatcaaagtacggcgtatttgcagggtacggctcaggcagactccagttactatctgcaacagatgcagcaaagcacgaatgatagcaagaccaactggcaattactcgccattcgtgcactgctgaaggaaggtaagaaaccgcaggcgatcgacctgttcaaccagctaccgtctaatctcaacggtgcgcaaagccgcgaaaggtcgctgctggcggtggaagtgaagctggcgcagaacgatttccagggcgcgcagacactgctcagcaagctcgacccggcaagccttgaggagaaccaactgccccgctactggcaggcgcaaattgacgccagccagggtcaaccctcgctgaacctgctgcgggccctgattgcccaacagtcgctgttaagcctgcctgcgcaaaagcagaaaaacatcgacgcgacctggaaagcgctcaccgccatgaccaaagatcaggccaacgcgctggtcattaacgccgatgagaacgtcctgcagggctggctggatctgcagcgcatgtggtttgataaccgcagcgatccgacgatgctcaaggcgggagtgaaagactggcagactcgctacccgcaaaacccgggggcgaaaatgctgccgacgcagctagtgaatatgcagaactaccaggccgcatcgaccaataaaatcgccctgctgctgccgttaaacggccaggcggcgatttttggccgcacgatccagcagggctttgaagcggcgaagaacggcgcgcctgccgttgcaggaagcgcagtacccgcccaggtcgcccaggcggcgaacgttgccgaaagcgccgtagtcagcccatcgcaggcggaggtcaccgatctgacgaccaccaataacgctcagaccccggtacaggcgccagcggccgaccaggcgcaaaccgcggcgccggtcaccgcgccggcggcagtacaagccccgacgccggaggccaccagccagccggcggaagcgccgcaggctcaggcagtcgccgcaacgccagccaacccttccgcagaactgaaaatctacgacaccaccactcagccaatgagccagctgctggcccaggtacagcaggatggcgcgaccatcgtcgtcggcccgctgctgaaagataatgtcgaagatgtcatcaagagcaatacctcgctgaacgtgctggcgctcaatcagccggaaaaagtcgaaagccgggccaatatctgctatttcgccctctcgccggaagacgaagcccgcgacgcggcgcatcacattcacgatcagggcaaacagactccgctgctgctggtgcctcgcggcgccctgggcgatcgggtggttaccgccttcgccaacgagtggctgaagctggggggcggtaccgtcctgcaacagcgcctgggctccaccgccgagctgcgcggcagcgtcaacagcggtatttcgctaagcggtacgccggtctcaaccctgccgtcagcgcaggacagcgccctgggtagcccgagcgatgtgccggtcagcagcaccggcggcgtcgacgccgcgtatatcctggccacgccggaacaaatcgcttacatcaaaccgatgatcgccctgcgtaacggcagccagagcggcgtaacgctctacgccagctcccgcagcgcccaggggacttccggaccggacttccgtctggagatggaaggtctgcaatatagcgagatcccgatgctggcgggaagtaaccctgccctgcagcagcaggcgctggccgccgttcgtaacgactactcgctggcgcgcctgtacgccatgggcgccgacgcctggtcccttgccaaccatttctcgcagatgcgccaggttcccggctttgagctgaacggcaataccggcgatcttacggccacgcaggattgcgtgatcaacaggaaactgtcatggctcaaataccagggtgggcaaatcgtcgcggccaactaagtaaacagaccggcgatgcctgggaaacccaggcgcgccgctggctggagagccagggtctgcgctttatcgccgccaacgtccgcgagcgcggcggcgagatagacctcatcatgcgcgacggcagcgtcaccgtctttgtcgaagtacgctatcgtcgcagcgcaaactacggcgatgccgcctccagcgtgacgccgcaaaagcaacaaagactgctcaaagccgcgcgcctgtggctctgccgacagaatgggagctttgagactgtggattgccgtttcgatgtggtagccttcaccggaaacgacatccaatggctaaaaaacgcctttggcgaatagcgtaaacgaattaagggatcccgtgctcgacagaatcaaagcctgcttcaccgaaagcattcaaacccaaattgcagcagcggaagcactcccggacgccatctcacgtgcggcgatgacgctcgttcagtcgctgctgaacggcaacaaaatcctctgttgtggtaatggcacttccgccgccaacgcacagcattttgctgccagtatgattaaccgttttgaaacagagcgtcctggtttacccgccattgcactaaataccgataatgtggtcttaaccgcaattgccaacgatcgcctgcatgacgaaatctatgctaagcaggtgcgagcgttgggacacgccggcgacgtgctgctggcgatttctacgcgcggcaacagccgggacatcgtgaaagccgtggaagcggcggtcacccgcgatatgactatcgtggcgttaaccggttatgacggcggtgaactggctggcctgttagggcagcaggacgtcgaaatccgcattccgtcgcatcgcagcgcgcgaattcaggaaatgcacatgctcaccgtcaactgtctgtgcgatttgatcgataacacgctttttccacaccaggacgattaaggagaacacatgaaggctctctcgcccctcgccattctgctgtctgcgctactgcttcagggatgcgttgctgccgcggtagtcggaacggcagcagtcggcactaaagccgcgacggacccgcgtacggtaggtactcaggtggacgacagcacgctggagctgcgcgttaacagcgcgctgtcgaaagatgaacaaattaagaaacaggcccgcatcaacgtgaccgcctaccagggcaaagttctgctgaccgggcagtccccaacgtccgatctctccgcgcgcgcgaagcaaatcgctatgggcgtagaaggtacgacggaggtgtttaacgaagtgcgtcagggccagccgatcggcttaggaaccgcgtcttcggatacctggatcaccaccaaagtccgctcccagctgctgggtaccgaccaggtgaaatcctccaacgtgaaggtgacaaccgaaaacggtgaagtgttcctgatgggtctggtaaccgaccgtgaaggacgcgcggcggcggatatcgccagccgggtgagcggcgtgtctcgcgtcaccaccgcctttacctatatcaagtaagcgtctctgcctcccggccagcgctacgctgagccgggctacgggttcaccgttggctgtgggccggtagcccggacaggcgcgcagcgccgcctccgggaagatcatcacagtaaagcgactcccccgaccaccgcgccgcacagcgccaccagcccaccggtcagccacagcgccttcgccgggaacgctttacgcagcataatcagtgacggtacgctgacagcaggcagcgtaatcagcagcgccagcgcgggcgccatgcccattcctgccagcatcatggtctgcacaatcgggatctccgccgccgtcggtatcacaaacaggcagccggcaatcgccatggcaatcacccagaacagcgtattctccaccacgccatcggcgtgagggaatagccacacccgcgcggcgcccagcaccagaaccgccagaatataaaccgggatggtattccagaacagcgtccacagcgcgcgcagccagcggctgaagaagccgtcctgccccgttgtgaccgacatttcaggcacgggaaccggctgcgtcgccgcttctttcacccatttctgaaccagcgtggcgaccaccagtacggtcgccagtcccgccagcaggcgaatcagcgcaaactgccagcccagcacgaagcccataaacaccagcgtcgccgggttgagcagcggattgcccagccagaatgccagcgcgccgcccatggatacctgctgtttacgcattcccgcagccaccggcgcggcgcagcaggtgcacatcatccccggcagagagaacgcggtccccagcagcgtaccgcgaaaacgcgattgccctaacgtgtgccgcagccagtcacgcgggatcagcacctgaatgagcgatcccagcagcacgcctaataccgccgctttccataccgccaggaaatagaccagcgcgtaatcccaggccgcagcgaaaggattcgcgtcgctatttgcaagaatggatttgccgatactgtgcgtctcagcggcggtaaaggctttgccgtaatagggctgccatttaacgaaccacagaccaacgataacgacgagaaaaaacagcgcgggcttccaccattgaaacggtgctgccgcctgagatgaagactgaccagccatagcattccccagggagtgtcatgataaattgaggacatgaatactacgcctccggggaaactttggaaatcagtaatcccccgcgcgcgcggccctttcgcgcagctgcgacgaggagagaatgcggacgccttcctgcgcgggcgagagcgcctccgcgagtagcgcgcttgccacgtcccgcgcgtctatcgatttcaggtttcccggcagcaggctaaaaagcggcgcaaggagcgtttcgccggtgcgttttttttcgcgctcgcctatcagcattgacgggcgggcaatggtcaggcgcggccactgctgcgcaatcagcgcctcttccatctcaccttttacgcgattatagaaaaagggcgaatgcgcattggcccccatcgcgctgacgaccagcatatgctgcgcgcccagcttttttcccaccagcgcggtatcaatgaccagcgtataatcggcatgcacaaacgcctctttgctacccgcttcccggcgggtagtccccagacagcagaaaacaatatcgaccggatcgaccacctgcgccagcgcgtccgtgagctgcggatcgtgcgggttaaatacgccggagatatcggtcagcggccgacgcgtgggcgcagcaatggacttaatatccggtacgttgagtagcattcgcagtaagtgaccaccaactaacccggttgcccccgttaacagtacctgactcatcgaaactcctttgcagatttttctatgttgcgatcccagcctcatgttccagacttaatactctacgaggtaattatccatcatcatcagggaaatgcctcattccacaccgaaacactggaggaagaatgagtaagaagatagccgttttaattaccgacgactttgaagactccgagttcacctcacccgcggacgcctaccgtctggccggacacaaggtggtgaccattgaaaaacaggcggggaagaaggtaaaagggaaaaaaggggaagctgaagtcgttatcgataaagccattgatgacgtcagccctgccgacttcgacgccctgctgctgccgggcggatattcaccggactcgctgcgcggcgacgaacgctttgtcaccttcacccgcgattttgtcaacagcggcaaaccggtcttcgccatctgccatggtccgcagctgttgattagcgccgatgtgattcgcgggcgcaagctgacggccgtgaagcctatcgtcgtcgacgtgaaaaacgccggtggcgaattctatgaccaggaagtggttatcgacaacgaacagctggtgaccagcagaaccccggacgacctgccggcctttaatcgtgaagccttacgcctgctcggcgcctgattcgcgcagccagtgcagctttttcccaaagcccagcgtgttatcggtgaacttgatctcatcgggacgaatctcccagacggatgccgatagcatgcgggcgacaggaaaacggctgacgtagcgcttgcgcatcgccgcctcttcttccccggtgaggcggcgaattttacctttgaactgtacgccgcggatcagcgccacgctctttggctggccgttgaccgtcccggccacgttggcgctttccccggtcatttggccgtggcgcgttttttcatcgctgagcagataaaatgcgaccttctccgggtcataaacgtaaaaagcattggcgcaccacagctcatcatcgcgggcgacgcaccaggtcacgacgtgctgcttacccagccagcggccgatcgcggcgagcgtatccatctttactctccagtatgttatggtgctcacaccttaacatagcgacctctgtaccgtgtgctggtttctctatctgattcgtaccgccgataatcgcctttataccgggattaccaccgatgttgcacgccgcttttgccagcaccagactggcaagggcgcgaaagcgctgcgtggaaaaggcgagcttcagctggccttcagtcaggaagttggtgaacgctcactagcgctacggcttgagtatcgtattaagcagctaacgaagcgccagaaagagcgcctcgttgccggggacggttcatttgaggcgctgctggaaagcctcagaagcgattaaagtggtcgctatattcgaccagcccgctcacgccgttcagcgcgtcatcggccagacgatgcacctggaaagcctcagcgctatcgggccagcggcagcgcagatcgaaacgcgccgcgggttcaaagcccagacggccatagagcgccggatcgccaagcgtcacgacggcggcatagccaaactcgttcagggaatcgagcccttcatagaccagctgacgcccgatgccctgaccgcggtagctttcatcgaccgccagcggagccagtccaacccactgcagctcttcgccttcgacggcgaccgggctaaaggccacgtagcctacgacctgaccttcgtcatccgtcgccaccacgcccagcgtgatcaggccatcttcacgaagactgtgcaccagctgcgcttccgcgtcgccgccgaaggtacgacgcaatagagcatcgatacccggcgcatcaatcccaatctctactcgaatcagcatgcctcacctaccgatgtctgttcaggtttctgcgggcctttcaggccagcttcaacaaagtccgccagctgcagcagcataatacgcagcgcctttggcatctgctccagctcaatggcatccatcaggttttttacatacagtcccagctcggtatcgccttcgataaccaggcgacgctggaagaacagcgtatccggatcctgcttacgcgccgcgatcatcagcaggtcgctggcgtcggcgctgaagctgacgtccgcttcagccgcagggctgaccaccagacgaccgtccaccaccgaggtataccacagcaggccgatgtcgcgcacatgaatacttaaccagcgcccctcgagaaactccagttccccatccgccagcgcctggcgaaattgccagcttaatacctgttccagcacctggcgcttgagggcaaatggcgccagcttaaccggcacgctcatcatcgacgggccaaagtgaaccagtttggaacgcagtttatccaacacaagctttactccatgaatgcaatagttcctctattgtgccatatcaaataaacgacatagcggcgtaaatcaacaaaatcacgatgccgggccgcaggtattgatcccgccaatacgcttttaactgcctcaaatcaaaaattgtcaccaaaaggttaactaaaatcccagctcattaaccatccagcgtccctgacgggccgcgtttttcaggaaaaattatggagctgctctgcccagccggtaaccttccggcgcttaaggcggccatcgaaaacggcgccgatgccgtctatatcgggctgaaagatgacaccaacgcccgccactttgccggccttaatttcaccgaaaagaaactgcaggaagccgtcagctttgtgcaccagcatcgtcgcaaactgcatattgccattaacaccttcgcgcatcctgatggttatgcccgctggcagcgcgcggtcgacatggcggcgcagctgggcgccgacgcgctgatcctcgccgatatcgcgatgctggaatacgccgccgagcgttatccgcatattgagcgccacgtttccgtccaggcctcggccaccaacgaagaggcggtaaagttttatcatcgcaattttgacgtcgcccgcgtggtgctgccgcgcgtgctgtcgattcaccaggtcaaacagctggcgcgcgccacgccggtgccgctggaggtttttgccttcggtagcctgtgcattatggcggaaggccgctgctacctttcctcttatctgaccggcgaatcgccgaataccgtcggcgcctgttcgccggcgcgcttcgtgcgctggcagcaaacgccgcaggggctggaatcacgccttaacgaagtgctgattgaccgctatcgggacggtgaaaacgccggctatcccaccctctgtaaagggcggtatctggtcgacggcgaacgctaccacgcgctggaagagcccaccagcctgaacaccctggagctgctgccggaactgatggcggccaatattgcctcggtgaaaatcgaggggcgccagcgcagcccggcgtacgttacccaggtggcgaaagtctggcgtcaggcgatcgatcgctgcaaagccgatccgcaaaacttcgtaccgcagtccgcgtggatggagaccctcggttccatgtccgaaggtacgcaaaccacccttggcgcctatcaccgtaaatggcagtgagaacagcaatgaaatattcattagggccggtgctttattactggtcaaaagagacgctggaagatttttaccagcaggcggcaagctgcagcgcggacacgatttacctcggcgaagcggtatgcagcaaacgtcgcgccaccaaagtcggcgactggatcgacatggcaaaaacgctggcgggaagcggtaaacaggtggtgctttccaccctcgcgctggtgcaggcgtcctcggagctgggcgaactgaagcgctatgtcgataacggcgaatttctgattgaagccagcgatctcggcgtcgttaatctgtgcgcggaacgtaagctgccgttcgtcgccgggcacgcgcttaactgctacaacgccgtcaccctgcgtctgctgctcaagcagggcatggtgcgctggtgtatgccggtcgaactttcccgcgactggctggcgaatttgctgacccagtgcgacgagctgggcattcgcggccggtttgaggtggaggtcctgagctacggtcatctgccgctggcctactccgcccgctgctttaccgcgcgctcggaagaccggccgaaagacgagtgtgaaacctgctgcataaaataccctaacgggcgcgacgtgctttcgcaggagaaccagcaggtgttcgtcctcaacggcattcagaccatgagcggctacgtctacaacctcgggaatgagctaagcgccatgaccgggctggtggatatggttcgcctgtcgccgctgggtagcgagaccttctctatgctggacgccttccgggcgaatgaaaacggcgcggcgccgctgccgctgacggcgaacagcgactgcaacggctactggcgacgactggccgggctggaattgcagagctgattaaccgctcactttgttaatggctatcgctgctttttaatgcactattaaagatgcagcttttctggctggcgtatcctggatacgccaggctggaagaagaccttcaatctgatgacgatgctgtagcaaagtgagcctttatgactgacaaatctgtttcgttctcggtgctcgatctggcgccgatcccgcaaggttcttccgcaaaggaagccttctcccactctttagacctggcgcagctggcggaaaagcgcggctatcaccgctactggctggccgaacaccataatatggtcggtatcgccagcgcggcgacttccgtcctgattggctaccttgccgcgaataccaccactctgcatctgggctccggcggcgtgatgctgccgaaccattcgccgctggtgattgccgagcagttcggtacgctcaatacgctctacccgggacgcatcgatctcggccttggccgcgcgccgggcagcgatcagccaaccatgcgcgcgctgcgtcgccatatgagcggtgaagtcgataacttcccgcgcgatgtcgcggagctggtggactggttcgacgcccgcgatcctaatccgcacgtgcgcccggttcccggctatggcgagaagatcccggtctggctgctcggctcaagcctgtacagcgcccagctggcggcgcagcttgggctgccgtttgccttcgcctcgcacttcgccccggatatgctctttcaggccctgcacctctaccgcacccacttccagccgtcagagcggttagcgaagccgtacgcgatggtatgcattaacattattgccgccgacagcgacagagatgcggaatttctgtttacgtccatgcagcaggcgttcgtcaaactgcgccgcggcgagaccggacagctgccgccgccggtgcaaaatatgcatcagctgtggtccgcttcagagcagtacggcgtcgaaaaagcgctgagcatgtcgctggtcggcgataaagcgaaaatccgtcacgggctggagtcgatcctgcgggaaacccaggccgatgaaatcatggtcaacggccaaatcttcgatcatcaggcgcgcctgcattcatttgatttggcgatgcaggtgaaagaagagcttctcggatagtgaaaaatgcggcatttctgccgcattttcaattagtgataggtgggtaatacgttaaagctcgacaggaaatgcacgataacgttacccagcccgaacagcagaaccaaagcaatcatcggctttccgccccaaacgcgaaacaatgggctaccaaagcgtttgcgcgatgcgcgagccagcagcgccggtacaattgccgcccagattgtcgccgccagccccgcatagccgatcgcgtagaggaatccgttcggccacagcaggccacccgccatcggcggaacaaaggtgagaagcgcggttttaaagcgtcccagcgcggagtcatcgaacccgaacagatccgccagataatcaaacagaccgagcgtcacgccaaggaatgaactggcaacggcaaagttcgaaaagatgactaacagcagatccagactccggctgttcagtaccccactgagcgcctggaccaggacatctatgttgccccccttctgcgcaataccgataaactcagggcgcgggatattgcccatcgtcaccagcagccacactacgtacagacccagcgccagcagcgtaccgtaaaccaggcacttaacgattgtgcgcggatctttgccgtagtacttcatcaggctcggcacgttgccgtgatagccgaaggacgcgaggcagaacggcagcgtcatcagcagatagggcatatacgaggcattttgttcagccacgttaaacagagtggtcggctggacgtgccccaacaggctgccaaaggtcaaaaagaaggtaatgaccttagctcccagcacaatggccgtcatgcggctcaccgctttggtgctcaaccagacgataaacgccaccagcagcgcaaaaccgaaacctgccgcccttgccggtacgttcagcgacatttcgctaaacgtatggtgcagaatcgagccgctggcggagatataggcgtaagtcagaatataaagaacaaaggcgatcgacacgccgttaaccagattccagcctttgccgagcagatctttagtaatggtatcgaagctcgagccaatccggtaattcaggttcgcttcgaggatcattaacccggagtgaagcatacaaaaccaggtaaaaaccagcgccgccagagaccagaagaaccacgcgccggacatcacaaccggcagtgagaacatgcccgccccaataatcgtcccgccaataatcactacgccgccaaacaaggacggtcgggttgccgtagtggtaagtgtcgccatttgccgaaatctccagtcgaaaatacttttcttgttatcaacgtgacgcactgtaccagtacacgagtacaaagggaataaaaaaagccccaatcataaagatcggggctgtatcgtttactttacgttagcggaaagcgctaattatgcatcgccaccgaaacgacgacgacctgcggagtcatcgcgacgcggagctgaagcatcatcgcggcgcggcgcgcggccaccttcacgacgttcgccgctgaaacgacgaccttcaccacggccgccttcgcgacgctcaccgccgaaaccacggccttcacgacgttcaccaccgccgaagctacgaccgccttcacgacgctcgccgccgccacgacgttcgccgctgcgttcaggacgcggctgagcatcgcccagcagctgcatgttcatcggcttgttcaggatgcgggtacgcgtaaagtgctgcagcacttcgcccggcatgcctttcggcagttcgatggtggagtgagaaccaaacagcttgatgttaccgatgtaacggctgctgatgtcgccttcgttagcaattgcgccaacgatgtgacgaacttcaacgccgtcatcacggcccacttcaatgcggtacagttccatatcgccaacgtcacgacgctcacgcttcggacgttcttcgccaccgcgatcgccgcgcgggccacgatcgttacggtcgccgcgacgttcgaaacgatcgtcacggtcgcggaactcgcgcttaggacgcataggcgcatccggcggcaggatcagcggacgttcgccctgagccattttcagcagcgcggcggccagcgtttccacgtccagctcttcgccttcggcagacggctggattttcgccagcagcgcacggtactgatccagatcgctgctttccagctgctgctgaactttcgccgcgaatttttccagacggcgtttgcccagcagttctgcgttcggcagttcaacttccggaatggtcagcttcatcgtacgttcaatattgcgcagcagacgacgctcgcggttctcaacgaacagcagcgcgcgaccagcacgacccgcacgaccggtacggccgatacggtgaacgtaagactcggaatccatcgggatatcgtagttaaccaccaggctgatacgctcaacgtccaggccacgggccgcaacgtcggttgcaatcaggatatccagacgaccatctttcagacgctccagagtctgctcacgcagggactggttcatgtcgccgttcagcgcagcgctgctataaccgctacgctccagcgcttcggccacttccagggtcgcgtttttggtacgaacgaagataatcgccgcatcaaaatcttccgcttccaggaaacgcaccagcgcttcgtttttacgcataccgtaagcagtccagtagctctggctgatgtccgggcgagttgttacgctcgactggatgcgcacttcctgcggctctttcataaagcggcgggtaatacggcgaatggcttccggcatggtggcagagaacagagcggtctgatgaccctccgggatctgcgccataatggtttctacgtcttcgatgaagcccatgcgcagcatttcgtcagcttcatccagaaccagaccgctcagcttagagagatccagcgtaccgcgtttcaggtggtccagcagacgacccggggtaccgacaacgatttgcggcccctgacgcagcgcgcgcagctgcacgtcataacgctggccgccgtacagggcaaccacgtttacgccgcgcatatgtttagagaattccgtcattgcttcagcaacctgtaccgccagttcgcgggtcggcgccagcaccagaatctgcggtgctctcagctcaggatcgatgttgttcagcagcggtaaagagaacgctgcggttttaccgctacccgtctgggccatacccagaacgtcgcggccgcccagcagatgcggaatgcactcagcctggatcggagatggtttttcgtaacccagatcgttaagcgcttcaaggatgggagccttcaggcccagatctgcaaaagtggtttcgaattcagccatgtagtacgtgtgcctcaaaattaatggcggccagtctacataactcatcgtgaaaatttacggtaattttcattgaaaagtgtgaaccggctcaaagtaggtgtattaacgaacaacaacgccctcacccgcaaaggtgatggcaatcaaaaaagggctgatgtgttcgtcagctattgctggtccgattctgccaggtcatcttgctcctggcccaagagcgataattccaacaatgcgtatcggtgctcaacgtagttatgaacgttgtttgcgaccgccagtttgaacagtgccgtagcgctgtccttgtcccccagacttaggtagtacttacctaaatagaagttggtttcactgagatgctcagcgagcgaggtgttatccgttgcgtctgccttcagacggtccattagctctttttcgctaatgtcgccaaggtagaacccgacaatgttccatccccattgttctttatccgacttgtttaagcgctgtctcagtgcttcaagcgcctgcttctcatcgagctgacgctcggcgagataaagccacaggcttcggaaaggatcattgggatcgtcttgataaaacgccagcagatcatcttgcgctaacttagcgcgaccgccgtaatacagggcgataccgcgatttaagtgcgcgtagttgtaagttggatcaagctcaagtacagaatcaaacgcttcataggcagcatcaaaattgcctgcctgcgttaagtaaatgcctaagtaattgaatacttcaggcatatccggtcggattgccagcgcttgtgaaaaatcatttcgcgctaatgccctcagaccgagactatcatacaacactccgcgctcatataaaagctgtgcgcgttcgtcatcggttaaagcccgactggcaagaatttgttccatgcgcgccagaatcacttcctgctgcaaagtcggttgcaatggcaccgcgaggactgcgtccttacgccaggcagagttgctgcatcctgccagcgtgagagctgtcgccacgaaacaccagcgcaaaaaaggcttcatttcccactcccgaagacaacgattggatgaacgtccagttccccggctgcaaacagggcgtcctgcccgcaatgcgccctccgcaatgcggagggcaaacggcaaccttactcgccctgctgttcggcagccggagcttccggcgcagccgcaggctgagtttgttcagttgcttctttgatgctcagacggacacggccctgacggtcaacttccagaaccttaaccggcacttcctgacccatctgcagatagtcggtcactttctcaacgcgcttgtcggcgatttgagagatgtgaaccagaccttctttaccgccgccaatggcaacaaacgcgccaaagtcaacgatacgggtcactttaccgttatagatacggccaacttcgatctcagcggtgatctcttcgatacgacgaatcgcgtgctgcgctttgtcgccgtcggttgccgcgatcttcacggtaccgtcatcttcgatttcgatagtggtgccggtttcttcggtcagcgcacgaataacggaaccgcccttaccgataacgtctttgattttgtccggactgatcttgatcgtgtggatacgcggtgcgaattcagagatatcgccgcgcggcgcgttaatcgcctgttccatcacgcccaggatgtgcagacgcgcacctttagcctggttcagagcaacctgcatgatctctttggtgataccttcaattttgatatccatctgcagagcagagataccttcgcgggaacccgctactttgaagtccatatcgcccaggtgatcttcatcgcccagaatgtcagacagtacgacgaagttgtcgccttctttcaccagacccattgcgatacccgcaacggcggctttcaccggcacgcctgcgtccatcagcgccagagaagcgccacagacggaagccatggaggaggagccgttagattcggtgatttcagaaaccacgcgaacggtgtacgggaactcttcgatagtcggcatcacggccagtacgccgcgcttagccagacgaccgtgaccaatttcacgacgcttcggagaaccgaccattcccgtttcgcctacggagtacggagggaagttatagtggaacaggaaggagtccgtgcgctcgcccatcagttcatcgatgttctgcgcgtcgcgtgcggtacccagggtcgcggtaaccagcgcctgagtttcgccacgggtaaacagtgcggaaccgtgggtacgcggcagaacgccggtacgaacgtccagaccacgaatcatatctttttcacgaccatcgatacgcggctcaccggccagtacgcggctacgcaccacgtttttctcgattgcgtgcaggatttcgcccagttcgttagcgtccagagcttcatcttccgcaaccagggtcgcgatagtttcagatttgatcacgtcaacctgagcatagcgctcctgtttgtcggtgatacggtaagcatcgctcaggcgagattcagccagcgcggcaacgcgcgcgttcagcgccgcatcaaccacttccggctgccagtcccagcgcggcttaccggcttctttcaccagatcgttgatgttctgaataaccacctgctgctggtcgtgaccaaacacgaccgcgcccagcatctggtcttcgctcagcagttcagcttcggattcaaccatcagtactgcggcttcggtacccgcgacaaccagatccagtttgctggacttcagctcttcctgggtcgggttcagcacgtactggtcattaatataaccaacgcgagcggcgccaattgggccgttgaacggaataccagacagggacagcgctgcggaagcgccgatcatcgcgacgatatccgggttaacctgcgggttaacggaaaccacagttgcgataacctgaacttcgttaacgaagccttccgggaacagcgggcgaaccgggcggtcaatcagacgcgcgatcagggtttcgccttcgctcggacggccttcacgacggaagaaaccacccgggattttacctgcagcgtaggtacgctcttgatagttaacggtcagcgggaagaaatcctggcctggcttcgcttttttctggcccacaacggtaacgaataccgcggtgtcatccatgctaaccataacggcggcagttgcctggcgcgccatcatgccggtctccagcgttacggtatgttggccgtactggaatttacgaacgatcggattaagcaaaattctatccttttatctatagatgatgtcaaatccacgataagacatcgtatgacccgatcttctgcatcctcgcgactaatgacaacctttacccgcccctgcgagtcaagcctctcattagccgcgcgaacctctgcatgaagatcattaatagcaacaatacatgagtttttaatgaattgctgccgcccggtcgaaaaaaggggccgtgaggccccttcttctgaaactcgcagaattagcgacgcagacccagacgctcgatcagagcagagtaacgtgcaacatctttacgtttcaggtagtcgagcagtttacgacgctgagaaaccatgcgcagcagaccacgacggctgtggtgatcttttttgtgctctgcaaagtgaccctgcaggtggttgatctgtgcagtcagcagtgcaacctgaacttcagtagaaccgctgtcgttttcgccacgaccgaactcagaaacgatttttgctttagcttcaacgcttagagacattttcgaactccaaaattaaaagaaagaaagggtgccgatctctaattcagcaacccctgatataacgctcgcaaatgttaaaacacgttggcgaacgttaagcggcgatattctactcgcagcagccttttatcgcaaggaaagcgctcagacagggtattcaaccaccagacgacgaggcgccacgcggccttcatcatccatctcacccataccaagaaacttctcttcagcgccttcagtaacgcgaaccagcccctgcagcggcgcgcccgatatccgcaccgggttaccgtttttaaagtagacggctgaagtttccggaatattcaccagcgggtaatccgaagccggactgtccatcggcatcagcagcgggtccagcagctgggctgcgggaatatcctgcgcatgtgcttgttcgaccagcgcctgcagctgctccagcgtcaccatccgttcgacgggatatttactgaccgccaggcgacgcaggaaaatgacgtgcgcgccgcacccgagtttctcgcctaagtcatcaataatcgtgcggatataggtgcctttcgagcagtgaatctccagctcaagctccgtcccctcatggcgaataaacagcagctcgtacaccgtaatcggccgggattcacgcggtacttcaatcccctgtcgggcatattcgtacagctttttcccctggtatttcagcgccgaatacatcgacggtacctgctgggtttcgccacggaagccgtcgagcgctgccgccagctgctccgggctaaacgtcagcggacgctcctccaccacctggccatcggcatcagaggtatcggtgcgctggccaagcctggcaatgacgcggtagcgcttgtcagaatcgagcagatactgggaaaactttgtcgcttccccgaggcaaatcggcagcataccggtcgccagcggatccagcgccccggtgtgccctgcccgattagcattataaagccgcttaactttctgcagcacgtcgttgctggatgcgccctgcggtttatccagcaacagtacgccatgcacgtcacggccgcgacgacgaggacgactcattagtcctccttactgtcgtccgggttcacacgacgttcatcgtcatgttttaccacgctggtcaccaggttcgacatgcgcatcccttcgactaatgaattgtcgtagaagaaggtcagttccggcacgatacgcaggcgcatcgctttgcccagcagcgagcggataaaaccagatgcttcctgtaaagccttgatccccgctttcacggcggcttcgtctttgtcgttcaggaaggtcacaaacactttggcataggccaggtcgcgggacatttcaacgcctgaaacggtcgtcatcatgcccagacgcgggtccttaatttcgcgctgcaggatgattgcgatctctttttgcatctcctgggccacgcgctgcgggcgaccaaattctttcgccataataaattctccagacaaataagggggccacgcggccccctttaattttgtataaccgggtggcgctgcgcttccccggcctactaaacgattaatcgatggtacgttgaatctcgatgatttcgaacacttcgatcatatcgccaacgcgaacgtcgttgtagttcttaacgccgataccacactccataccgttacgaacttcgttaacgtcatctttgaagcggcgcagggattccagctcgccttcatagataaccacgttgtcgcgcaggacgcggattgggttatgacgcttgatcgtaccttcggtaaccatacagcctgcgatggcgccgaatttcggcgatttgaacacatcacggacttcagccagaccaatgatctgctgtttcagttccggagacagcatgccgctcatcgctgctttcacttcgtcgatcagatggtagatgacggagtagtagcgtagatccaggctttccgcgtcgataactttacgtgcggatgcatcagcacgtacgttgaagccaaccagaatcgcgttggatgcggccgccagggtcgcgtcggtttcggtgataccacctacgccggaaccgataatcttcactttcacttcgtcggtagacagttttagcaaggagtcggagatcgcttccactgagccctgcacgtccgctttgaggacgatgttcacttcgtgaacttcgccttcggtcatgttagcgaacatgttctcaagcttagatttctgctgacgagccagtttaacttcacggaatttaccctgacgatacagcgcaacttcacgtgcttttttctcgtcacgaacgacggtcacttcgtcaccggcagccggtacgcctgacaggccaaggatttccaccggaatggacggacccgcttccagcacttcctgacccagttcgttacgcatcgcacgaacgcgaccgtattcgaaaccgcacagaacgatgtcgcctttatgcagcgtaccttcgcgtaccagaacggtggcaaccggaccacgacctttatcgaggaaggattcgataaccgcgccgctcgccatacctttacgaaccgctttcagctccagaacttcagcctgcagcaggattgcgtccagcagttcgtcgatgccggtacccgctttagcggacacgtggacgaactggctttcaccgccccactcttccggcagaatgccgtactgggaaagctcgtttttaacgcgatccggatccgcttccggcttatcgattttgttcaccgcaaccacgaccggcacacccgccgctttcgcgtgctggatagcttcgatggtctgcggcattacgccgtcgtctgccgccacaaccagaaccacgatatccgtcgcctgcgcaccacgagcacgcatagaggtaaacgcggcgtggcccggggtatccaggaaggtgatcatgccgttgtcggtttcgacgtggtacgcaccaatgtgctgggtaatgccgcccgcttcgccagaagccactttcgttgaacgaatgtagtccagcagagaggttttaccgtggtcaacgtgacccatgatggtcacaaccggtgcgcgcggttcagccgcagcgccggtgtcacggtcgctcattaccgcttcttccagctcgttttcacgacgcaggataactttgtggcccatctcttcggcaaccagctgtgcggtttcctggtcgatgacctggttaatcgtcgccatggcgcccagcttcatcatcgctttgatgacctgagaacctttgacggccatcttgttggccagatcgccaacggtgatggtttcgccgatgataacatcacggttaaccgcctgagccggcttctggaagccttgctgcagagcagaacctttacgatgcttgccacctttaccgccgcgaacggccgcacgggcttcttcacgatcggctttcgattcagcgtgtttgttgcctttcttagccggacgcgccgctttcgcattacgtccacggccgcgaccgccttcaacttcacgatcgttatcgtcttcagcctgacgtgcatgctgagaagtcgttacgtgatagtcagtggtctcttcaggggtttctggcgcttcagtccagttcttttcattttcttgagccatacggcgtgcttcttccgctacacggcgcgcttcttcttcaagtttgcggcgtgcttcttcttccgatttgcgcttcagctccgcagcttcgttttcgcggcgttgcttttcagcctgggcggttttggtcatatcgtcggtttgttgattgctcactttgtctttttccgcggcttcacgtttcgctttatcggcgagttcacgtttcgcttgttctgcggcctcacgttcagcttttaattgcgcctcgcgtttggcagcttcttctgcctcacgacgggcttgctcttccgcttcacgctgcgcctgctcttccgcggcaaggcgttcggcctcttgcggatcgcgtttcacaaaggtgcgtttcttgcggacttcgatttgtaccgacttactctttccaccggtacccggaatatttaacgtgctgcgcgttttgcgctgcagcgtcagcttgtcgggcgctgagccgtgttcacggttcaggtgcgtcaacaaggtttgcttctcttgcgcggtcacagaatcatcagccgatttgcggatccctgcatcagcaaattgctgtatcaggcgatccacagaggtctgaatctctgaggccagcgctttaatggtcacatctgtcatgctgttccttcctgctacagtttattacgcttcgtcgccgaaccaacaaatattacgagcggccatgataagttctccggctttctcgtcggtcaagccttcgatatcagccagatcatcaatgccctgctcggcgagatcttccagcgtacaaacaccacgggcggccagggtgaatgccagagcgcgatccaaaccttccagattcaacagatcgtcggcaggtttgctgtcacccaggctctcttctttggccagcgccagcgtggtcagcgcgtttttcgcccgctcacgaagtgcttcaacggtcgcttcatccagaccgtcaatttccagcagttctttcattggcacataggccagctcttccagagtggcgaaaccttcttcaaccagcagcgtggcgaaatcttcatcgatatcaagatatttagtgaaggtatcaatcgctgcatgggcttcagcctgatgcttagcctggaggtcatcaacggtcatgacgttgagttcccagccgctcagctgagacgccagacggacgttctgaccgttacggccaatggcctgcgccaggttgcccgcttctactgcgatatccatggtgtgcttgtcttcatctaccacgatagatgcgacgtcagccggagccatggcgttaatcacgaactgcgccgggttatcgtcccacagcacgatatcaatacgctcgccgcccagttcagtcgagactgcctgaacgcgcgcgccgcgcataccgacgcaggcgccaaccggatcgatgcgcttgtcgttggttttaaccgcgattttggcacgagagccaggatcgcgagccgccgctttaatttcgagaacttcttcaccgatttccggcacttcaatgcggaacagttcaaccagcatttccggcttggagcgagtcacgaacagctgcgcgccgcgcgcttccggacgaactgcgtacagtacgccacggatacggtcacccggacggaagttctcacgcggcagcatatcttcgcgcaggatcacggcttcagcgttgttgcccagatccagcgtaatattgtcgcggttcactttcttcactacgcccgtgatgatttcaccttcgtgctcacggaactgatcgacgaccattgcgcgttcggcttcacgtactttttgtacgataacctgcttcgcggtctgcgtagtgatacggtcaaaggtgacagattcaatctggtcttcgacgtaatcgccaggattcatgctttcatcttcgaaacgcgcagcttccagcgtgatttcgcgagtcggctgggtcacttcttcaacaaccagccagcgacggaatgtgtcgaaatcaccgcttttacgatcgatttctacgcgaacgtcgatctcttgctcatattttttcttggtagccgttgctagcgcactttccaacgcttcgaaaattttctcacgcggcagcgccttttcgttggaaacggcttcaacaacagccaaaatttctttgttcatcggggcctttcacctcaatccagactgttaaaagtggggaaccaggttcgccttctggatgttactcagcgcgaacacttcatctttgccttcgacggttaccgtgatcatctcaccgtctaccgctttgataaggccctgccatttgcgtcggttctgtaccgccatgcgcaaaaccagcgaaacttcttcgccgatgaaacgctcatagtgctcggcggtaaacataggacgatcgagacctggagaagaaacttccaggttataagcgactgtaatcgggtcttctacgtccataacagcactgacctggtggctcacatcagcacaatcatcaacattgatgccatcttcactatcaatatagatgcgcagtgtggacgtgcgaccgcgaataaattcgatgccgaccagctcaaagccaagcgcttcaactggcgctgtgagcatctctgttaatttttgctctaatgtggacaaacccacccccaagacataaaaaaagggcgtatagcccagttattctgaagtcagataacaaaaaaccccgataaatcggggctttagataactgaaccctgagatcgcaactgcgatctggaacactttccagaagaattctttcaaattcgtctacgaaggacccggtcctcacagtatatttgaaaaagtacttaatgggaaagtggttgcgggggccggatttgaaccgacgaccttcgggttatgagcccgacgagctaccaggctgctccaccccgcgcctgaaacgtggcatattttactcgttttgagtaaaagacgcaaatactgctgggatttggtaccgagagacgggacataaaatcgtagtgaattgtattgatacttcatatattttgtcaacatgaatttcacattgccaggtttcggttcatgctggtatttctgggttttttggcaaaaagcggctcagcctcttcctgtcgccagcaaaagatgattaaatgaaaactcacaattaatgcataaacatgcaataaagattgttgagtcaaactcaccacagtctatctagcagggttttattttatgacgacgattctcaagcatctcccggttggccaacgtattggtattgctttttctggtgggctggataccagcgccgcgctgctgtggatgcgtaaaaagggagcagtcccttatgcatataccgccaatctgggacagccagacgaagacgattacgagaccattcctcgtcgtgccaaagagtatggtgctgaaggggctcgtctgatcgactgccgtaagcagctggttgcggaaggcattgccgcgatccagtgcggcgcatttcataacaccaccggcgggttgacctactttaataccacgccgctgggccgcgcagtgaccggtaccatgctggtcgccgcaatgaaggaagacggtgttaacatctggggcgacgggagtacctataaaggcaacgatatcgaacgtttctatcgttacggcctgctgaccaacgctgagctgaaaatttacaaaccgtggctggatagcgactttatcgacgagttaggcggccgccaggagatgtcagagtttatgatctcctgcgggtttgactataaaatgtcagttgaaaaagcctactcaaccgactccaatatgctgggcgcgacgcacgaagctaaagatcttgaattcctgaactccagcgtcaagattgtgaacccgattatgggcgtcaagttctgggatgaaagcgtcaaaatccctgcggaagaagtcaccgttcgctttgaacagggccatccggttgcgctgaacggacagacctttagcgatgacgttgaactgatgctggaggctaaccgcatcggcggacgccatggtctgggtatgagcgatcagatcgaaaatcgtatcatcgaagcgaagagccgcggcatctatgaagccccgggaatggcgctgctgcatattgcctatgagcgtctgctgaccggtattcataacgaagataccattgagcaataccacgcgcacggtcgtcagctgggtcggctgctgtatcaagggcgttggttcgattcccaggcgctgatgctgcgcgacggcctgcagcgctgggtagcaagccaaattaccggcgaagtgacgcttgaactgcgtcgcggcaacgactactccatcctgaataccgtctctgataatctgacctataaagcagagcgtctgacgatggaaaaaggtgactcgatgttctccgctgaggatcgtatcggccagctgacgatgcgcaacctggatatcaccgatactcgcgataagctgtttggctacgcgcagtccggactgctgaccgcgtcttccgccactggcctgccgcaggtggaaaacctggaaaataaagcgaagtaacgctgcagagaaattcgcaaaggccgctaacgcggccttttttatgcagaaaaatcccgaacccaaccggacatatctgccgctaatgctgctgctcaactttttggggacgaaaaaaaagacgcttttcagcgtctttcttcaggaaattggtaccgaggatgggactcgaacccacaagcccgttagggcactaccacctcaaggtagcgtgtctaccaattccaccacctcggtacggatactgcttatcagtgcgggatgtcgctgctcggctgcgccggcgcggtcggctgagtttgctcagttttcggcgcgctcagattatcccactcacttcctttattggtcttgttgctgttgatattgcccagcgccagactgatgatgaagaacagcgcagccaggataccagtcatacgggtcatgaagttaccagaaccgctggatccaaacagagtgccggaagcgcctgctccgaaggaggctcccatatcagcgcctttaccttgctgcagcataatcagacccacaaggccaattgccacaataaggaaaacaactaaaagagcttcgtacataatcaacctgttccttgcggatttgccgcataccaagtgcttcgaccaataaagcgggacgttttaacgtttcccactgaagcgggtgtgaatactaaccaaagcgaatgaccttcgcaagggcaatttcagcgcattgtatcaagtgcggaaaaaaacagcaaaaagcgattttttgtcgattaaaaaggcggcaagcgtcgcctttttaatcacttagcaagagaaattaaacgctttttacggcatcggcgatacggtgggcaaattcgtgcacctgctcttcgtgctcaccttccaccataacgcgaatcagcggctctgtgcctgatttacgcagcagtacgcgcccccgattgcccagcgccgcttccacttcagccgttaccgcttttacgtgctcatgttccagcgggttaccgctaccttcagtaaagcgaacgttaaccagaagctgcgggaacattttcattccgctgcacaggtcgtgcaggctcatatggttacgcaccatcgccgccaccacctgcaggctggcgacaatcccatcccccgtcgtggttttatccagtaagatcacatgaccggagttttctgcgccaatgcgccagcctttctcctgcagcttctccagcacatagcggtcgcccaccttcgcgcgaacgaaaggaatgcccagctgtttgagcgccagttcaaggcccatattgctcatgagcgtcccgacggcgccgccccgcagctgcccctggcgtagcccctcacgggcaatgatatagaggatctggtcaccgtcgactttgttgccttcgtggtccaccatgatgacccgatcgccatcgccatcgtaggcaatacccaggtcggctttctccgccagcacgcgcgcctgcagagcacgaacgtccgtcgccccgacctcttcattgatgttgaggccatcaggctcacagcccatcgctataacctgagcgcccagctcgcggaaaacattcggcgcaatatgataagtcgccccgtgagcgcaatcgactaccaccttcaaagcattgaggctcagctcgttcggaaaggtgcctttgcaaaactcgatatagcgaccggcggcgtcgacgatacgactggctttacccagctcggcggaatccacgcaggtcagctctttttccatttcggcttcaatggcttcttctacctcatccggaagcttggtaccttcgatagagaagaatttgatgccgttgtcataaaacggattatgtgaagcggaaatcacaatcccggcttccgcgcggaaggtgcgcgtcagataggcaattgccggcgttggcatcgggccggtaaaagaagcggataatcccgcggcggccagtccagcctccagcgcggactccagcatataccctgaaatacgggtatctttaccaataataatcttccgtgaaccgtggcgtgcaagcaccttacccgccgcccagcccagctttaatacaaattctggcgttattggcgcatcgcctacgcggccacgaataccatccgtaccaaaatatttgcggttactcataacgtttattttccttagcggccagggtagcttccaccacgcgcagcgcttctaccgtttctttgacatcatggacgcgaataatctgcgcgccctgcattgcagcaatgactgcgcaagccaggctgccattcaggcgttccgtcggcccgacattcagcaactgacctaccatcgacttacgtgacatgcctaccagcagcggaagaccaaaatgatggaactctccaagtcgggcaagcagttcataattatgagaaagatttttaccgaaaccaaatcccgggtcgagcaacaatttatcttttgcgataccggcccgttcgcagcgcacaatatgttcgataaaaaagcgctcaacgtcagcaaacacgtccgcgtacttcggggcatcctgcattgtcttcggctgaccctgcatatgcatcaggcacaccggcaagcccgtttcagccgccgcctccagcgctcccggttcggtcagcgagcggatatcattgatgatatgcgcgccaacacgcgctgactcgcggatcacctccggctttgaggtatcaacggaaatccagacttcaaagcgctgggcaatcgcttctaccgtcggaatgactcgcgccagctcttcctcgacgctgacatctgccgcccccggacgcgtcgattccccaccgatatcaatgatagtcgccccggcattgatcatcagattggcatgcttcacggcttcgaccagcgtgttgtgggtcccgccatcagagaacgaatccggggtaacgttaagaatacccatcacatgtgggtgagagagatcgagggttgagccctgggctacaagtttcatcgctaaatccctgagtcagagaaagattgaaaaagaaaaaccccggagcaaacgctcaggggttttagaaaagtacaacagcatcaataacggctaacttatttgtcgcccagctgttctgacatcgtattacccgggtttggcgtacgcggttcatcgaccggacgcggcgcacgaggcgtgccattgttgtcagaattgttggacgagcccggttcttcccagccagctggcgggcgaacatcgcggcgagccatcaggtcatcaatctgcggggcgtcgatggtctcatatttcatgagcgcatctttcatcgcgtgcaggatgtccatattatcgttcagaagctggcgtgcacgattgtagttacgctcaatcagtgacttcacttcctggtcgatgatacgcgccgtttcatcggacatatgcttcgctttcgcaacgctgcggccaaggaatacttcaccttcttcttcggcatacagcagcgggccgagtttgtcagagaagccccactgggtcaccatgttacgcgccaggttggtcgcgactttaatgtcgttcgacgcaccggtagaaacatgctctacgccgtagataatctcttccgccagacgaccgccgtaaagagtagaaatctggctttccagcttctgacggctggcgctaatcgcgtcgccttcaggcaggaagaaggtgacacccagcgcgcgaccgcgcggaataatcgtcactttgtgcaccggatcgtgttccggcaccaggcgaccaataattgcgtgaccggcttcgtgatacgcggtggactctttctgcgcttccgtcatcaccatggagcgacgttccgcacccatcatgattttgtctttcgctttctcgaattcaaccatcgatacaacgcgcttgttgccacgagcggcaaacagcgcagcttcgttcaccaggtttgccaggtcagcaccggagaagccaggcgtaccgcgggcgataattgccgcgtcgatatccggcgccagcggtacgcgacgcatatgcactttcagaatctgttcgcgaccgcggacatccggcagaccgaccacaacctgacggtcaaagcggcctggacgcagcagcgcagggtcaagaacgtccggacggttggttgccgcgataacgatgataccttcgttaccctcgaagccgtccatctcaaccagcatctggttcagcgtctgctcacgttcatcgtgaccaccgcccaggccagcgccacgctgacggcccacggcgtcgatttcatcgataaagatgatgcacggagccgctttcttggcttgttcaaacatgtcgcgcacgcgggatgcacccacaccgacgaacatttcaacgaagtcagaaccggaaatcgtaaagaacggcacctttgcttcacccgcgatggcttttgccagcaaggttttaccggtgcccggagggccgaccatcaggacgcctttcgggattttaccgcccagcttctggaaacggctcggctcgcgcaggtattcaaccagttcaccaacttcttctttcgcttcgtcacaaccggcgacgtcggcgaaagtggttttgatctggtcttccgtcagcatacgcgccttgctcttaccgaacgacatggcgcctttgccaccgccgccctgcatctggcgcataaagaagatccagacgccaataagaagcagcatcgggaaccaggagatgaagatagaagccagcaggctcggctcttctggcggctcacctaccaccttgacgtttttagtcagaaggttatcaagcagcttaggatcgttcaccgggatgtaggtcgtgtaacggttactatctttcttggtaacgtttatctcacgtccgttgatacgcgcttcgcgaacctggtcctgattgacctcctgcaggaaggtagaataatccaccttgcggccattcgactcgctgggcccaaagctctggaatactgacatcagcacaacggcaatgaccagccagagtattaggtttttcgccatgtcactcaagggattaacctcatattacaactgtgttaaaaacagcgtcaggatactctatatccagcgtctttcaaactttcgtttgaaatctgccggttatggtttacgcccggtcgctacaatatacacttcacgcgaacgggcgcgagaagagtccggcttacgaactttgaccttcgtaaacagggagcgaatctctcttagatactcatcgaagccttcgccctggaacaccttcactacaaaactaccacctggcgctaatacatcacgagccattccaagcgccagttccaccagatacatggcccggggaatatccaccgccggtgttccacacatatttggcgccatatcggacatgacaacttgtactttactgtcacctacacgctcaagtaacgctttcaggactaattcatcacgaaagtcgccctgaaggaagtccacaccaacgattggatccataggtaaaagatcgcaagcaatgatgcggccgctgttaccgatctgcgtaaccgcgtattgcgaccagccaccgggtgcagcgccgaggtcaactatcgtcatccccggtttaaaaatcttgtcactttgctgtatttcatcaagtttaaaccaggcacgggaacgtaacccctttttctgtgcctgctgaacatatttatcgctaaagtgttcctgaagccaacgacttgagctggcagaacgctttttacctgtcatttaacattcccatttcgggttcatcgtacttcgcgacgtaaaaatcgacgcggtagtttggcgatatatgggagatggcggtagaatgaaccgttttcaatcccaacgtaagcaaaaaaatacgatgaatctgagtactaaacaaaaacagcacctgaaaggtctggcacatccgctcaagccggtagttatgcttggcaacaatggtttgaccgaaggggtactggccgagattgaacaagcgttagagcaccatgaacttatcaaggtgaagatcgcctcggaagatcgcgaaactaaaaccttgatcgtggaagctatcgtgcgcgaaaccggcgcctgtaatgtacaggtcatcggtaaaacgctggttctgtaccgcccgactaaagagcgtaaaatctcgctgccacgctaagaatatcctggttatcgacacaactttgtgtaaatcgagggttttctgcgggtagacgagcaaaatgccatgctccggacgctgataaaaggccgctacgcggcctttttcctttctttacaatccatcaacatcgtagcgttaaattcgaattaaaggtactcaaccttaagaatttcgaattcgacttccccgcccggtgtacggataaccaccacatcgtcctgctctttaccgattaaaccacgtgcaatcggcgagtttacagaaatcagattttgcttaaaatccgcctcgtcatcgccaacgatacgataagtttgctcttcatccgtatcgagattcagaacgctgaccgtcgaaccaaaaatcacccggccattgttgggcattttggtgatatcgatgacctgcgcgttcgacagcttcgcttcgatatccttaatgcgaccttcacagaagccctgctgttcacgggcagcatgatactcagcattttctttcagatcgccgtgctcgcgggcctcagcgatggccgcgatgatttcaggacgacgtacggacttcagaaaatccagttcttcgcgcagtttttcagcgccacgtaaggtcatcggaatagcttgcatttgttatacctctttttcattccttcatggagcagacaacgccgctccgcagccggtcaagacttgagcagggccggagcaaaagaaaaccgacccggaaagtcatccccaggccagcagcaattttcaatttgatacgtattttaccctgaagttcactatgggtcatcgtttactttacagggcgatgcaccgtagtatgacggactggtttcaggttgttagcgcgagattatgcgattttccagatttatcatcggattgactgccggtatagcgcttagcgctcaggcggcgaatattgacgagtacatcaatcagcttcctgcgggcgcaaaccttgcctttatggcgcagaaggtgggatccccgacgccggagatagactaccatagccagcagatggcgctccccgccagcacccaaaaagtgataaccgcgcttgctgcgctgctgcagctgggtccggacttccgcttcaccacgacgctggaaacgaaaggcagcctcgatggcggcgtcctgaaaggcgacctcattgcgcgctttggcggcgatcctaccctcaggcgtcaggatattcgtaatatggtggccacgctgaagaaagcaggcgtccagcgaattgaaggtaatgtgctgatcgatacctccatcttcgccagccatgacaaagcgcctggctggccatggaacgatatgacgcagtgctttagcgccccgccggcggcggcgattgtcgatcggaactgcttctccatctcgctctatagcgcgcaaaagccgggcgatctggcgtttattcgcgtggcgtcttactacccggtgaccatgttcagccaggtgcgtacgctgccccggggctcttctgaagcacagtactgtgagcttgacgtggttcccggcgatctgaaccgttacaccctgaccggctgtctgccgcagcgcagcgagccgctgccgctggcttttgccattcaggatggcgccagctacgccggtgcgattctgaaagctgagctgaccgacgccgacatcacctggagcggtacgctgctgcgccagacgctggcaaacgatccgggtaccgtcctggcaagtacacaatctgcgccgctgcacgatctgctgcgtattatgctgaaaaaatcggacaacatgatcgccgatacggtattccgcaccattgggcacgctcgcttcagcgtaccgggtacctggcgagccggttccgatgcggtacggcagatcttacgtcagcaggccggcgtcgatctcgggaataccatcattgccgatggctcaggtctgtcgcgccataacctcatcgcacccgcgacgatgatgcaggtgctgcagtacatcgcccagcacgataatgaactcaactttatctcgatgctgcctctggccggccatgatggttctctgcagtaccgcgcagggctgcatcaggcaggtgtcgatggcaaagtctcggcgaaaacgggctcactgcagggggtgtataacctggccggtttcatcacgacggccagcgggcagaagatagcgttcgtgcaatacctgtctggctacgccgtgcctccggccgaccagcgtaatcgccgcattccactggtgcggttcgaaagccgattgtacaaagacctctatcagaacaattaaagcaaaaagggccgcatcattggcggcccttttcgtttgttcaggattaacgtttgtagatgaattcaacgccttcttcgtcgtcttcatcccaatcatcatcccagtcttcatcatcttccacttcagcttcttcaagctgctggcggtgatagtcgtcccacataaactcgactttttcggcaggcttcgcttcttccgcatgcacaatcgggttttcgatgataaaggtcatcacgtcccagcacaggtcttttacgccctgctggctggccgccgaaatcaggtagaacttatcttcccagcccagcgcctgcgcgatagctttcgctttcgcttccgcctcagctttgtccatcaggtcaatcttgttaaagaccagccagcgcggcttagaagccagtttctcactgtatttttccagctcaccgataataatccgcgcgttctccaccggatcggatccgtcaatcggctcgatatcgatgagatgcagcagcacgcggcagcgctccaggtgcttcaggaagcgaataccgagacccgcgccttcagcggcgccttcaatcagccccgggatatccgccaccacgaagctcttctcgttgtccatacgcaccacgccgaggctcggcaccagcgtagtaaacggatagtcagcgactttaggcttcgcggcggaaacggcacgaataaaggtcgatttacccgcattcggcattcccagcatgccgacgtccgccagcagcatcagctccagctgcagatcgcgcttatcgcccggcgtccccatcgtcttttgacgtggagtacggttaacggacgatttgaaacgggtgttacccagaccgtgccagccgcctttggcgaccatcaggcgctgaccatgcttggtcatatcacccatcgtctcgccggtgccctgatcgatgacgcgagtccctaccggtaccttcaccgttacgtctttaccgcgtttaccggtacagtcacggctctgaccgttctgcccgcgctcagcgcggaaagacttctcaaaacggtagtcgatcagggtgttgaggttttcgtccgcctcaagccagacgtcaccgccgtcaccgccgtcaccgccgtccgggccgcctttcgggatatatttttcgcggcggaagctaacgcaaccattgccgccatcacctgctacgaccaggatcgttgcttcatcaacaaacttcattttactctccgtaaatcattcgcctgagcgggggagcggcacaaccgcttctcgcttacgccaccgtccccaaagacggtggccgacggcggaatacatcgcgcccgcaaccacgacaaacgcaccgagataacccatcaggttcaacagcggtctggcgaaaacgtcgggccaggccagtgataataaatctgaaaatagcagcgtaaacagcggcgttaaggtaatcaacgcgctcacctgcgccgcctgccagcgcgccatcgcttccgccagggcgccgtagccgaccagggtattgagcccgcaaaaaaccagacaggccagctgccagtcgcttaatgccagcacctgcgaaggcttcgctaatggcaatagcgatatcgtacataaagtgtacagcaaaaaaaggatttgctgtgatgccagacggcgcaataacaccttttgcgcgacgccgtagcacacccacaccgtcgccgcacctacgccgaaaattaccccccacgtgtagtccgtcaggcgggtaaaaatctcgatcaggctggtgttaaaaaacatcaccagaccgctcaccagcatcagcgctcccacaacctgagtgccgcgcattttctctttaaggacaaaaacgctggccaccatcatgccgaccggagacagctggccaatcacctgggaagcggtggggctgagatattgcaaggaagaactaaacagaatgaagttaccgaacaaacccgctgtcgcaataaccagcagtaccaaccaccgcggcttgcgaaaaatccgcagcgggggcagctttcttttcatggcgaggatagcgccaagaccaaaacttgccatcaaaaagcggtaaaacaccaccgtcggcggttccatcacttcaagaacctgcttcattgctatcggcagggcaccccagcacatcgccgtggtgagcgctaaaataatgccgatgccggcctgctgcttcatgcccgttttccctgcagaaaattttccggggtttcaatgtaaaaagccccgcaacacgttgcggggctttaatccgttaccggaccacgaaaaacttactcagcaacgatgctgatgtatttacggttgttcgggcctttaacttcgaatttcactttaccgtctgctttagcaaacagagtgtggtcacgaccgcaacctacgttagtgccagcgtggaatttggtaccacgttgacgaacgatgatgctacccgccagaacggattcgccaccgaaacgcttaacgcccaggcgtttagcttctgaatcgcgaccgttacgagttgagccgccagcctttttatgtgccatttaaatctctcctcaggtcttaggcgctgatgccagtaattttcacatcagtgaaccactgacgatggccctgctgcttacggtagtgtttacgacgacgaaacttaacgattttaactttctcgccacgaccgtgtgcaacaacttcagctttgattacgccgccctcaacgaaaggaacgccgattttaatttcttcaccgtttgcgatcatcagcacttctgcgaactcaacagcttcgccagttgcgatgtccagcttttccaggcgaatggtttgaccttcgcttactcggtgttgtttaccaccactttggaaaaccgcgtacatataaaactccgcttccgcgcacctcttcgtatgattcagagtgcgctataaatattcacaatagggcgcgaatattacgcaaaacgcgagcctttgacaagagcgatcagcgatcaacgcagaaaaaaaacacaactttcactccagcgtttaactacggcaatttttcagtacaatcatagcttcttttaattctgtcttaatccttctgtgatcccattcggatacgcggtaacaggacatttggcccggcttttgcgatgaatttagaaaaaatcaatgagttaaccgcgcaggatatggcgggcgtcaatgcgacaattcttgagcaactcgactctgatgttcagcttatcaatcagttaggctattacattgttagcggaggcggtaaacgcattcgcccgatgatcgccgtactggccgcgcgtgccgttggatatcagggaaacgctcacgtcgccattgccgcgctgatcgaatttatccataccgccaccctgctgcatgatgatgtcgtcgatgagtctgatatgcgccggggaaaagccaccgcaaacgccgcttttggcaatgcggctagcgtgctggtcggtgattttatctacacccgcgcctttcagatgatgaccagccttgggtcattgagagtgctggaagtgatgtcagaagccgttaacgtcattgccgaaggggaagtcctgcagctgatgaacgttaacgacccggatatcactgaagaaaactacatgcgggtcatttacagcaagaccgcacgtttgtttgaagccgcagcccagtgctccggcattctggccgactgcagcgcggaacaagaaaaagcgttacaggattacggacgctatctgggtaccgctttccagctgattgacgatctgcttgactacagttcagacggtgagcgtctgggtaaaaacgtcggtgacgatctgaatgaaggcaaacccacccttccgctgctgcatgctatgcaacacggcaacgcagaacagtccgccatgatccgtggggcgattgagcagggtaatggccgtcatcttctcgacgccgtactggaaacgatggcaacctgcggctcgctggaatggacccaaaaacgcgcggaggaagaggctgataaagcgattgccgcgcttcaggtccttcccgattctccgtggcgtgaagcgctaatcggtcttgcccacatcgctgtgcaacgcgatcactaacccctcctcttgctttcccgcgcaaaccgcgggaaagttccagtaagcgtcaaaaagccaagatccagccgtatcccttgatatattcctaatatcaaacccattaaaagaacttgttagaacattactggaacccgcggtatagtcattttgtcgtccattaaggacgccaggcatgtttattaccaggagaatttatggataagttcatcgactggcatccggcggatattattgccggattacgcaaaaaagggacgtcgctggcagctgaatcgcggcgtaatggtttaagttcttcaacgctcgccaatgcgctgacccggccctggcccaagggcgagctgattattgctaacgcgctggaaaccgatccgtgggtaatatggccatcgcgctatcacgatccccatacccatcagtttatcgacagaacgcaaatgatgcgcccaaggaagaacaacaagtaaagcgaggttgcagacaacagcccccggacaaacgtcagagggctgctgctacaggcttatatggcttattcgcctttgacgcgttcgatattcgcacccagcgcctgaagcttgtcttcgatacgttcgtagccgcggtcaatgtggtaaatacgatcgacaatcgtcgtaccttccgcaatacagcccgccagtaccaggctggctgacgcacgcagatccgtcgccatcacctgggcgccagaaagctgcttcacgccgtggcaaatcgccgtattgctttcgatttccgcatgcgcgcccatacggatcagttccgggatatgcatgaaacggttttcgaagatcgtctcggtgatcacgccggtgccctcggcaaccagattcagcaaggtgaactgagcctgcatgtcggtcgggaagcctgggtgtggggcagtacgcacgttgacggccttcggacgattgccgtgcatgtccaggctaatccagtcttcgcccgtttcgatatccgcaccggcgtcgcgtagcttggccagaaccgcatcaagggtatccggctgggcattgcggcacaggatcttaccgccagaaatcgccgccgccaccaggaacgtcccggtttcaatacgatccggcagaacgcggtagacgccgccgccgaggcgcgctacgccttcgatggtgatacgatcggtaccctgacctttgatcttcgcacccagcgtgttgagaaagttcgcggtatcgacaatttccggctcgcgcgcggcgttttcgataacggtcgtaccttccgccagcgtcgcagcgctcatgatggtcacggtagcgccaacgctgaccttatccatcacaatatgcgcgcctttcagacgtccattaaccgacgccttgacataaccctcttccagcttgatttccgcacccaactgctcaaggccggtaatgtgtaaatcaacggggcgcgcgccgatggcgcagccgccgggaagagaaacctgcccctggccaaaacgcgccaccagcggtcccagcgcccaaatagacgcgcgcatggttttgacgaggtcatacggagcacagaaaacgtcgaccgggccggcatcgatccatacggagccgttgcgcttaacgttcgcgcccagctggctcagcagcttcatggtggtatcgatgtctttcagcttcggtacgttttggatctcaatcggctcttcggctaatagcgcggcaaagaggattggcagggcggcgtttttcgcgccggaaatggtgacctcgccctgaagacgagttggcccctgaacacggaatttatccattgattctgttctctgttaagaattcacatacgctgcggggaacatccccacagcttataagccattaagtttgcggtctcgcgcccactcctgcggagtaaacgctttaatcgacagagcatggatgcggttatcggcaatatattccatcagcggggcatagatagcctgttgcttcttgacccgactcatgccgtcgaacatctcacccacagcaataacctgaaagtggctgccatcgccagagacgtggacttcctgaagggagagtgcgttcatcagcacggtctgaatttcatgattttccatgggctacatttatctgatagtgaaaacagcccaacatcttagaggaaagtggcgccgtcttaaacaagcaaaaagccccatcgaaaagtttgatggggctttcagaatagcttcagcactaaggcactgaaaaagttatgggatcatatcagcaggaaggttatacaacctgaccagggtttgcagattttcactcttcccggtcaatttagcctccccaccctgccgacgaaccagtgcgataaaatgcactaatagcgccagcccggcggtgtccacgcgggtcacggcgctcaggtcgatggcagacacgccatccgtcgcctgcgcgcgcgcttcccacagcaggaccagaagatcctggtccagctctccgcgcagcgccagcgtctcaccatcgcgagcccagctcagctgcccggtcattattttttctgttccagagtaatcggctgcgctgagcttgccttcagctgcgccgtcagaccatcaacgcctttagtacgcagcagatcgctccactcgttttgtttagtggtgatcatgctcaccccttccgcaatcatgtcgtacgcctgccagttaccggtctgggtatttttacgccactggaaatccaggcgcaccggcggacggccattcggatcaaggatggtgacgcggataggaacaatggtcgcgctgcccaacggctgctcaggggcaatctgataggtctgaccgtgatacatcgccagcgcctggccataggcctgcttcagatattcgcggaaggcggcaaaataggcttcacgctgcgccggggtcgcttctttgtaataacgacctaacaccagcgcgccggcgtatttcacctgaacatagggcagcagttcctgatcgacgatatcgcgcaggtagttcggattagcctgaatcttcggctgctcgttcttgaggcgatcgaaggttttctgcgccgcttcgtccatcagcttgtacggattggactgatccgcggcggtggccgcagtcaaaggtgcaatcaccagcatggcgaccattagtaagcgtttaaacatatcttaactctcctgaaattagtgcgtcgtgccggctggcggcgtagcgtcagtatgactctctccagcagcctgttcatcgccagaattcttattgtcgctacctttactgttataaaggaactggcctatcaaatcttccagcaccattgcggatttggtgtcctgaatggtaccgccatctttaaggatagtggttcccagctcaggatcttcaaacccgatgttcatcgccaggtactgttcgcccagcagaccggaagttcggatcgccagcgagctggtatccggaatatggttgtagcgctcatcaatatcgagcgcgacgcgaggcaggtaggtcttaggatcgagcgtaatatccgccacgcgtccaacgacaacgccgccaatccgcaccggagagcgcgctttcagaccgccgatattgtcaaaagtggcatagagccgataagtcggttcggtacgtaaagaggttacgtttgccgccttcaggcagacaaacagcgcggccagcagcgcaaccagtaaaaacacccctacccagatttcattttttctcgtttgcatgaactcaattcccaaacatcagcgcagtcagcacaaaatccagccccagaaccgccagcgacgcatgcaccacggtacgcgtcgtcgcccggctaatcccggcggaagtggggatagcgtcataaccgttaaataacgcgatccatgttaccgtaatggcgaaaaccaggctcttaatcaggcagttaaccagatccatccgccagtcaacggcattttgcatcgcgctccagaagaagccgccatcgatgcccttccagctgacaccaaccagcgagccgccccatacgccgaccgccacaaaaataatcgttaacaacggcagtgaaatcacccccgcccagaaacgcggagagatcacgcggcgaagcgggtcgaccgccatcatctccatactggagagctgttccgttgcgcgcatcaggccaatttcagcagtcagcgccgagccggcacgcccggcaaacagcagcgcggcgaccaccggccccagctcacgcagcagcgacagcgccaccagcatgcccagactggtttcggcgctataggtggtcaacaccagatagccctgcagacccagcaccataccgataaacagccccgatacaatgatgatcagcatcgatagcacgccaacgttgtatagctgacgcaccagcagcggcgcatgcttgcgaaactcaggcttgcccacaaccgcgttgaagagcattaatccagcacgcccgaacgtcgcgatagtttttataccgcgatgcccaagcgcggctagcgcatttaacaacatgagtcgcttaactccctttgcccaataaatcatgatgataatcccccgccggatagcggaacggcaccgggccgtcggcgataccatcaatgaactgacggacccgagggtcggcattttcacgcagcgactgcgcgctcccatgcgctacgacctttttgtccgccacgatatatgcaaagtccgcgatgctgagcacctccggcacatcatgcgaaaccacgatacaggtgacacccagggtgctattgagttcagaaatcagcttcaccagtacccccatcgtaatggggtcctgcccgacaaagggctcatcgaacatgattaaatcaggttcgagcgcaatcgccctcgccagggcggcacggcgcgccatgccgccggaaagctcagaaggcatcagcttcgcggctccgcgtagcccgacggcttccagcttcatcatcaccgtggtgtgcagcagcgcttccggcaaacgcgtatgctcgcgcagcggataagcgacgttatcgaacacattcagatcggtgaacagcgcgccggactgaaacagcatgctcatgcgcttgcggacggtatacaggcgcgaacgcgacatctgcggtacgttttcaccatcaaacaggatctcgcctttatcgggcgggatttgaccgccgatgagacgtaacagggtggttttgccgatccctgatggccccattatcgcggtgatcttgccgcggggtaccgatagcgagatatcatcgaagatcacgcgatcgcccctcgagaagcgaataccgcgcacttcgactagattcgccgaactctggctcataaaatcatccttactagacacccgtcgggctaagcatggcgctttctttcaccacaaacccaacatttttacagaatcttacccgcccgggttagcgaaagctggcatttgttttacttttggcacacataaagtcaaaattaagaattcgttacgctgcctacggacggccagcgaggcaacgattatacctgaagaaaggactttagatgctcttagcgacggctctgttaattattggtttattgctggttgtctacagcgccgatcgtctggtctacgccgcttcaatactctgccgtatgctggggatccctcccctgatcattggcatgacggtagtcagcatcggtaccagtttgccggaagtgattgtttccgccgccgcttccctgcatgggcaaaccgatctggcgatcggcaccgctctcggatcgaatatcaccaatatcctgctgatcctcggcctcaccgcgctgtttcaaccttttaccgtgcattctgatatcctgcgccgcgaattgccgttaatgttgctggtcagtttactggcaggatttgtgctgtacgacggccagcttacgcggatagacggcctttttttgctggcgctggccattctgtggctgctgtttacccttaaaattgcccgccttgcggaacgccagggtaacgacagcctgacccgtgaacagctggcggagctgccgcgagaaggctcgcttcccgtcgcgctgctctggttgggcgtcgcgatgattgtgatgccgatggccacgcggatggtggtcgataacgccacggtgctggcaaacttttttgctatcagcgaactgaccgtcggcttaacggtcgtcgctatcggcaccagcctgcccgaactggccacggccatcgccggagcgcgaaaaggcgaaaatgacatcgctatcggcaatatcattggcgctaatattcttaatattgtactggtcctcgggctccccgcgctgattgcgccaggcacctttgccgccgaggcctttacccgcgattatggcgtcatgctgctggtcagcctgatcttcgccgcgctgtgctggcgccgtaagcagcagcccggtcgccttgccggtgccctgctgctgggtggttttgtgctttggttagcgatgctgtactggacagcgccgctcttcgttgaatgattcgggataacattatgtcgcaaatagatttgccagcggattttgactttcaacgggcaggccgcgaggttctggacattgaacgtgaaggtctggcccagctcgatcaatacattaatgaagattttacccgtgcctgtgagaccattttccgctgtaccggtaaagttgtggtgatgggaatggggaaatccggccatatcgggcgaaaaatggcagccactttcgccagtaccggaacgtcatctttcttcgttcatcccggtgaggccgcgcacggcgatttaggcatggtaactccatgcgacgtggtgatcgcgctatccaactcgggcgagtcaaatgaaatcctcgccctgattccggtgcttaagcgccagcaggtggcgctgatttgtatcaccagccgaccggaaagcagcatggcgcgcgcggcggatattcatctgtgcgtgaaggtgcccaaagaggcctgcccgttagggctggcccccacgtcaagcaccaccgccgcgctggtcatgggcgatgcccttgccgtagcgctgctggaagcccgcggttttaccgctgaagattttgcgctatcgcaccccggcggcgctctgggccgtaagctactgctgcgggtcaatgatatcatgcacaccggcgatgaaattccgcacgttggcctggaggccacgctccgcgatgcgttgctggaaatcacgcgcaaaaatttaggcatgaccgccatttgcgatgatgaaatgaatatcatcggcatcttcaccgatggcgatctgcgccgcgtatttgataccggcattgatatgcgtaacgccagtattgccgaagtgatgacgcgaggcggaatccgcatccgtcccggcacgctggccgttgatgcgctgaacctgatgcagtcccgtcatatcacctgcgtgctggttgctgatggcgaccgtctggtaggtgtgatacatatgcacgatctcctgcgcgcgggcgtagtgtaagtaaggaaaaaataatgaataatgctgatgccctgatagcgacctgctacgggccggtaagccaggactttcttgaccgggcggcgaagatccgtttattgatacttgatgtagacggcgttttgtccgacggtcttatctatatgggtaacaacggcgaagagctgaaggcgtttaacgtgcgcgacggctacggtatccgctgcgccctgacttcagatattgaagtggcgataattaccgggcgaaacgctaaactggtggaagatcgctgccaaacgctgggcattacgcatctctaccaggggcagtcggataagctgctggcgtttcgtgaactactcaataaactggccgttagcgcggatgaagtcgcctatattggcgacgatctgatcgactggccggtgatggctgaagtgggtttaagcatagcggtagccgatgcgcatccgttgctgctcccgcgcgcggattacgttactcgtatcaacgggggtcgcggagcggtacgcgaagtgtgcgatttgctactattggcgcagggcaagctggatgaggccaaagggcaatctatatgagtaaaaccagacgttgggttatcattttactgtcgctggtcgcgctgatcctgatcggcctgaacctggcgagtacggacgataccacccagcaagcgatcaatcctgacgatccaacgtataccagcgagcatactgataccgtcgtgtatagccccgaaggagcgcttaactaccggctcatcgcggaacacgtggagtatttttccgaacagcagctctcgtggttcacaaaaccggtgatgaccacctttgataccaataaagtaccaacctggtctatcaaagcggataaagctaagttgacgaatgaccgcatgctgtatctttacgggcacgttgaggtaaatgcgctgacggcggattctcaactgcgcaaaattacgacggataacgcccagataaacctggtgacgcaggatgttacctccgatgacatggtgacgttgtacggaacaacatttaattccagcggcctgaaaatgcgcgggaacctgcgcagtaaaaatgccgagctgattgaaaaggttagaacctcatatgaaattcagaacaaacaaactcagccttaagattgcgctcgccagcgccttactggccgccagcctgtcggcacaggcaaagacaggtgataccgatcagccgattcacattgaatccgatcagcagtcgctggatatgcagggcaacgtcgtcacctttacggggaatgttgtcgtcactcagggaacgatcaaaatcaacgccgacaaagttgttgtgacccgtccgggtggagagaaaggcaaagaggttattgatggctacggtaacccggccaccttctaccagatgcaggacaacggtaagccggtaaaaggccgcgcgtcgaaaatgcattatgaactgcaaaacgactttgtcgtcctgaccggcaatgcgcatctggaacagatcgatagcaatatccagggcgacaaaatcacttacctggtgaaagagcaaaaaatgcaggccttcagcaataaaggcgggcgcgtgaccacggttctggttccttcgcagctgcaggacaagggtagcgatcagtcaaagaagggtaagtaattcgttatggcaacattaactgcaaagaatcttgctaaagcctataaaggccgccgcgttgtagaagacgtcagcctgaccgtgaattcgggcgagattgttggtctgctcggtccgaacggtgccggtaaaaccaccacgttctatatggtcgttggtatcgtaccgcgcgacgccggcaacattatcatcgatgatgaagatatcagcctgctacccctgcacgcgcgcgcgcgtcgcggaatcggctatttgccgcaggaggcctccatattccgccgcctgagcgtttacgataacctgatggcggtactgcagattcgcgacgacctgagcaacgagcagcgtgaagaccgggcgaaagagctgatggaggagtttcacattgagcatctgcgcgatagcctcggccaggcgctctccggtggtgaacgccgccgcgtcgagatcgcccgcgcgctggccgctaacccgaaatttatcctgctggatgaacccttcgccggcgtggaccccatctccgtcattgatatcaaacgcattattgaacacctgcgcgacagcggtcttggcgtcctgataaccgaccataacgtccgggaaacgctggccgtgtgtgagcgtgcttatatcgtcagccagggccacctgatagctcacggtacgccacagcaaatccttgaagacgagcaggttaagcgcgtgtatcttggggaagacttcagactctgatagggtagaggttacagacgttttagccggagatattggccctgaatatgaagcaaggtttgcaattaaggctaagccaacagcttgccatgacgccacaactgcagcaggcgattcgtctactgcagctgtccacgttagaactccagcaagaactccagcaggcgctggacagcaacccgttgctggagcaaaccgatcttcacgatgaggtagaaaccaaagaggccgaagatcgtgagtctctggataccgtcgacgcccttgagcagaaagacatgcccgaagagctgccgcttgatgccagctgggatgagatttacaccgccggaacgccgtcaggcaacggcgttgattatcaggatgatgaactgcccgtctaccagggcgagaccacgcaaagcctgcaggattatctgatgtggcaggttgaactgacgcccttcaccgataccgatcgcgcgatcgcgacctctatcgtcgatgccgttgatgatactggctacctgaccgttcctgtcgaagacatcgtggaaagtattggcgatgatgaaatcgggcttgaagaagtagaagcggttctcaagcgcattcagcgtttcgatcccgtcggcgtggcggcaaaagatttacgcgattgcctgctggtgcagctttcacagtttgccaaagagacgccgtggattgatgaagctcgcctgatcatcagcgatcaccttgatctgcttgccaatcacgacttccgtagcctgatgcgcgtgacccgcctcaaagaagacgtgctaaaggaagcggtaaatctgatccaatcgctggatccgcgcccgggccagtcgatccagactggcgagccagaatatgtcattcctgacgttctggtgcgtaaagtgaacgatcgttgggtcgttgagctcaattcagatagccttccgcgcctgaagatcaaccagcactatgccgccatgggtaacagtacgcgcaatgacgctgacggccagtttatccgcagcaacctgcaggaagcgcgctggcttatcaagagcctcgagagccgcaacgacacccttctgcgcgtcagccgctgcattgtcgaacagcagcaggctttttttgaacaaggtgaagagtttatgaaaccgatggtgctggcggacatcgctcaggccgtcgaaatgcatgaatccaccatttcacgcgttactacgcaaaaatacctgcacagtccgcgcggtatttttgagctgaagtatttcttctccagccatgtaaacaccgaaggcggcggcgaagcatcgtcgacggccattcgtgcgctggtgaagaaattaatcgccgcggaaaaccccgcgaaaccattgagtgacagtaagctcaccaccctgctatccgatcagggtattatggtggcgcggcgaaccgttgctaagtaccgagagtctttatccattccgccgtcaaatcagcgtaagcagctggtttgacccaaccgataaggaagacactatgcagctcaacattacaggacacaacgttgaaataacccccgcgatgcgcgatttcgttaccacgaagttcagcaaactggagcagtttttcgacaggatcaaccaggtctacattgtgttaaaagtggagaaggtgacgcaaatagcggacgccaatctgcatgtcaacggtggtgaaatccatgccagtgcggaagggcaggatatgtatgctgcgatcgatggtcttatcgataagctggcaagacagctaacaaaacataaagataaactgaaacaacactaattgtccgggcaatagcctacgccaaccgcccgcaggcggttggccaggagagctcaggtgaaattatgataaataacgattcggctctacaactgagcaatgtccttaaccaggaatgtacccgtagccaggttcactgccagagcaaaaaacgcgcgctggaaatcatcagcgagctggcggcaaagcagctaggcttaccgccccagatcgtcttcgaggcgatccttacccgtgagaaaatgggcagtaccgggattggcaacggtattgcgatcccacacggtaaactcgaagaggatacgctgcgggccgtgggcgtttttgttcagttggaaaccccaattgccttcgatgctatcgacaatcaacccgtcgatctgctgtttgcccttcttgtcccggccgatcaaactaaaacgcatctgcatacgctctcgctggtggcgaaacgtctggcagataaaactatttgccgccgcctgcgcgctgcgcaaagtgatgaagagctgtatgaaatcattactgaagcgggaagtaataatgaggcgtaacggaagtcgcaccttactctttttcgtactgaggagaaacggtacatggtactgatgatcgtcagcggccgttcagggtcggggaaatccgtcgccctgcgagcgctggaagatatgggtttttactgcgtcgataacctgccggttgtgctgttgcccgagctggcgcgctcgctcgccgacagaaacatctcggcagccgtcagtattgacgtacgtaacatgcccgagtcgccggaaatcttcgagcaggcgatgaaaaatctgcccgcagaattttcacctcagctgctgttcctggatgccgatcgtaacaccctgattcgccgctacagcgacacgcgtcgtttacatcctctgtccagtaaaaacctgtcgctggaaagcgccatcgatgaagagagcgacctgctggagcctctgcgttcccgcgccgacctgatcgtcgatacctcagaaatgtcggtgcatgagctggcagaaatgctgcgcacgcgtttattaggcaaacgcgagcgcgaactgacgatggtgtttgaatcctttggctttaagcacggtatacctatcgatgccgactacgtttttgacgtgcgctttctgccgaacccgcactgggatccgaagctgcgtcccatgaccggcctcgataagcccgtcgccgccttcctcgaccggcacacggaagttcacaattttatctaccagacccgcagctatcttgagctatggttacctatgctggagaccaataaccgcagctatttgacggtggccattggttgtaccggtggtaaacaccgttcggtttacatcgccgaacagctggctgactacttccgctcgcgcggtaagaacgtgcagtctcgtcatcggacgctggaaaaacgcaaatcatgaccgttaagcaaaccgttgaaatcaccaataagctgggcatgcacgctcgcccggcgatgaagctgtttgaattaatgcagaactatgatgccgaggtgctgctgcgtaatgatgaaggtaccgaagcggaagcaaatagcgtgattgcgctgctgatgctcgattcagctaaagggcgtcagatcgagattgaagccaacggcccacaggaagtggaggcgctggcagcggttatcgcgctgttcaacgccgggtttgatgaggattagctttcattcccccggcggcagcgtgccttccgggttaccggttgtgaaatcatcaatgcagcttattcgcctgcataaacccttccccacctaactgcctcatctggcgcaggatccacgcctgacggctgcgaacataacccgatggcgcatcggcgcggaagcgtattgggttaggcagcaccgcagcgagcagcgcggcttcggaagccgtcagtttactggccggtttgtgaaaatagcgctgcgacgcggcttcaacgccaaacgtcccctcaccaaattcagcgatattgagatagaccgtgaggatccgctttttactccatactgtctcaatgccgacggtcagtcccgcctccagcccttttctcagccagctgcggccgtcccacagaaacaggttttttgccgtctgttgcgacaaggttgaggcgccgcgaatgcggttctcattgcgttcattatgcgccagcgccttctcaatggccgtgacgtcaaatccccagtgttccgggaatttctgatcttctgcggcaataaccgccagccccatccacggcgaaatttcatccatgtccacccagtcggaatgggcgaggtaatgaaaatcccctgaaagccaggcgccgacctgtcgctccagcatcaccgccgaaaaaggaacaggtacgaagctaaacagggcaatcccgccgccccatagcaccgcacaagccaacaatagcctcagcacgaagcgcttaattaaccgcaacggcgaaaagcgaaatgtcatgccgtcagaaccaatacgcgagagaccagtttttcaatgccactcgccgcttcggcgatgttctgcgccagcatatacgcgggggtcgtcaccactttgttgtcttcatccaccacaatatcgtcgaccgggcaaggcacgtgttcagcccccatctcctcaaccgcgtcggcagtatcaagatcggtaccaatggtcacgcgtagcggtatagcaaatattttcggcaacagtgccggagcgatacagataaagcccaacggtttacccgcctgatgcatcgccagcgccagcgccttgagatcgcgatcgacttcacattcgctcccctgtgaagcaaagctgctgaggttctttgctgcaccaaaaccgccggggacgatcagcgcatccagcgcatccgctcgggcattggccaaaggctgaatctctccgcgtgcgatacgcgccgcttccacgagcacattacggctttccgcctgcgcttcgccggtcaggtgattgataacatcggtttgcactttatctggcgcatagcagatggcctgagcgccgctgcgggctattgccagcagggtaatgacggcttcatgaatttcacttccgtcataaacgccgcagccgctcagcaccacaccaattttcttcatcacatcagccccttagtacaagtttatgaaagcagtcaaaaattttgaattactcgctatgcttcacatattttactgtttcatgtaacaaactatttaaggtttgctatcttaatgagcgagtaagccaaatcctcaggttgcgccgtgtaaaaaaatcactcaaatgattctggcgtaacgaccagttccctggtgttggcgcagtattcgcgcaccccggtttatccggggtcattttttatctgccgccgcgacccacgctttcagcaccgcgacatcgttttgccactctgatttcatctcttcaacccattcacccacgttatccgaccacgcaggtaaatccggcgtttgaatctgctgccctaactgctggatatggcgcaaaccgattgagcccgcagcccctttaatcttatgaccctcatcgacaatgcctttctggtcgcgagcggttaaattggattccaggaccgccaggtagcccggcatcattctttcaaaaacggccagaccgtcattaatcagcttcggccctaccagttcgatatactgctcaagcatcggaatatccagtacagaagccgatttactgctatctacagatggcattgcattctcctcttcttccggcgcatcccagaattttttgataatcgcagttaatgccggaaccgataatggcttactaagaacatcatccattcccgcatccagatactcattcttgttcttcagcacgttagcggtaagcgccaccagcggcgggagctcatcggcggcaaagcgttgtttcagctgacgagaaatatcgagtccagtcatatccggcagctgaatatcaagcagaaccagatcgtactcgccgggtacaaacatctccagcgcagccttgccggtcatcgccacatccacgctgttgcccagcttctccagtaccgagcgcgccacgatcacgttgagctcaatatcttccaccagcagcacgttcagcgcaggtaatggcatttcatcttccgccagcgtgtcctcgacctcttcagccacggccggagcgtgtacggtaagcgtaaaagtcgcgcctttacccgggaggctggtaacgcaaatatcaccgcccatattcctcgccaggcgccgcgatacggcgaggccgatgccggtgcccgtcgctggcttgccgccctggctatctttcacctggtaatacatggcgaaaattttatcctgttccgcttcagggatgccaatccctgaatcttctacttcaaagtgcaggatatcgccttcgtcatagcgcacgcggacgttcacattcccgccttgcggagtaaatttcacggcattactaataagattccacaagatttggcgcaaacgcgttccgtcggtgatcactttatgcggcagcggaagcgtggggtccagcacaaaatgcaggcctttctgctgcgcctgcaggccggagaggttttccaggtcggccaggaagccggtaaagtccaccggctggttatccagctgaattttacgccgctccatcttatccatctcaataatatcattgaagatattacccagcgttaccgctgagacgtggatggttttcaggtatctttcctgttcatcggtaagatcggtatccagaaggattcggctaaggcctacgatgccgttaagcggcgtacgcagctcatggctgatcgttgagataaaggtggtcttatcacggctggcccgctccagcgcgtcctgatagcgcttacgctccgtaatatcgcggccaaaccccatcaggccgcgccgcttaccgacgcggtcataataaggcactttgcggatttcaaagcaggccttgcgcccgtccggataatccagccactgctcgtaggtgagcgatacgttatggcggaagactttctcatccgtctccagcactttctccgccacctcttcgctgtaaacatcctgcggcttaagatgaataagctgcttttcacttttaccggtcaacagttccatcgctcggttacagccagaaaactctttatcttcattacgatagaaaaccaggtccggagaggcatccaggaaggagcgcaagaaggaggattgctgttccagctgaatttgcgcctcttcacgctctttcatctcaattttcagctgctcaagcgtcgtttcacgttccgcttccgccttttcacgttcgccgatttcctgattaagctgggcgatgttgtccttaagctgcacattcagcttgagatcgcgttcgcgcatctcctccagtttctccaccagcctcgagaggcgctgccgggactcttccaactgctcaaccaccaccgacaggaaatagaccgcccacggggtaatcagcaagccaaagaagatggagcggatcacatcaatactttccacctggccgtgcagcaccatcgtcacggccatctgcacaacgatcgccagcaccaccagcgcaaaggccagcagcattgaaaagcgcaccagacccagcttcatcatcaggtcaacataatactgcgccagcatacggatttgcttcataagggattccttcgcgacaacttcgcacaataatactcaattctgagcaagacgctgtaagttgtgccaaaaatgcgggaaggattgtagttacgcgcctgacggtggagagccgtcagccggaaatgacgttattcggcagcagccggagagatccagcaacgcccgatggctgacccctgcacgccgtattcattgagatatttatccagctcaaccatcccggtccaacggttctcacaccacagcggcgccagcagcgtcgggcgtcgggcgctggcggagatacggtgataaatcacgtctggcggagtatggcgaatcatctctcctgcggtgaccgtatacgcttccagcgcaataccgtttaacctgccggcctgccacgccctggccataatactgcccttcacaatatgaagtggatgcagcttaatgccgtctacgccggtctccaccacctgcgctaaggtctccaggcattcacgctgcccttcgcccggcaggcccacgataaggtggctacacactttgaggccgcgctcgcgtgccagacgggtggttcgctgatagcaggcaaaatcgtggccgcgattgattcggtgcagcgttttatcatgcgcggtctgtagccccagctcgagccagacttcatacccctgctcccgatattcagtcagcagatccagtaccgcgccggggacgcagtccgggcgagtccctacgcatagcccgacaatattcgcctggctgaccgcctgctgatacatggcgcgcagcacctgcacctcggcaaaagtgctggtataagcctggaaataggccagatagcgctttgcgcgattcacccgctgcgcctgatgggccagctgttcagcaatcgagcggtgctgctgctcttcatcggcaaaagaggcgacattacagaacgtacagccgccgcgaccaatagtgccatcgcgatttgggcagctaaatccaccatgcagcgtcagtttatgaaccttttcaccatagcggcgcataagatccccaccaaacatattgactaatttttgtaactgcataatctgatagaccggccttaagaaaggggccaagcctgccatttttagctaccgacggcgatgacctggatcaatcgtcaacgcggccgcctatctcattgcataaacactcaagataactgcaatttaattcatccttatggtaatgagttttccttatatatagccgctgatttgccattatctttaccagggcataaaacagtatcagtcaccgcaaatcaaacaaaaaccagtttaaaaaactgcaatgaaaaaacaattcagcacagaaggataatgtctcgccgtcgatatagtgagacagatcacactcaattatgacgaccggtacgtttccctggcatttaaaatgccattattttcttaaaaatcattaaattaggtgttgtatagcacatttttgtataaataagattgccatttgacgtatgtgtggattcccgataagttgggaatccgctggaagctttctggatgagtgctctgctcatcatatttatgcagtaattgagattccctcttaacagcaagtcctcaaacttgtgtaccgatgcgaaaaggatttaaagagggcgaatgcgaggtgtaaaccccgtcgccatgctctttctgtgcccgtgcgcaatcggtatcggagggtgtcccgtagagcctggggaggttcactgatatgttgtacgataaatcccttgagagggataactgtggtttcggcctgatcgcccacatagaaggcgaacctagccacaaggtagtgcgaaccgctatacacgcactggcccgaatgcagcaccgcggcgcgattcttgccgatggaaaaaccggcgacggttgtggcttgctgctacaaaaacccgatcgtttcttccgaattgttgcggaagagcgcggctggcgtttagccaaaaattatgccgttgggatgctgttccttaataaggatcctgaactggccaaagcggcgcgccgcatcgtcgaagaagaacttcaacgcgaaacgctgtctatcgtcggctggcgcgatgtgccgaccaatgaaggcgttctcggtgaaatcgccctctcctcgctgcctcgtattgaacaaatctttgtgaacgccccggctggctggcgtccgcgcgatatggaacgccgtttattcatcgcgcgtcgccgtatcgaaaagcgtctgcaggaagataaagatttctacgtttgcagcctgtcgaacctggtcaacatttataaaggtctgtgtatgccggcggatctgccgcgcttctacctggacctcgcggacctgcgcctggagtcggcaatctgcctgttccaccagcgcttttccaccaacaccgtgccgcgctggccgctggcgcagccgttccgctatctggcgcacaacggcgagatcaacaccatcaccggtaaccgccagtgggcccgcgcccgtacctataagttccagacgccgctgatcccggatctccacgacgccgcgccgttcgtcaatgaaaccggctctgactccagctcgatggataacatgctggagctgctgctggcgggcgggatggacattatccgcgcgatgcgcctgctggttccgccagcctggcagaacaacccggacatggatcctgagctgcgttcgttctttgactttaactccatgcatatggagccgtgggacggcccggcgggcatcgtgatgtcagatggtcgtttcgccgcctgtaacctcgaccgtaacggcctgcgtccggcgcgctatgtgatcacgaaagataagctcatcacctgcgcctccgaagtcggtatctgggattaccaaccggatgaagtggttgaaaaaggccgcgtcggcccgggcgagctgatggttatcgatacccgcgaggggcgtattctgcactccgcggaaaccgacaacgatctgaaaagccgtcacccgtataaagagtggatggcgaaaaacgtccgtcgtctggtgccgttcgaagagctgccggatgaagaagtcggtagccgccagctggatgatgataccctcgccagctaccagaaacagttcaactacagcgccgaagagctggactccgtcctgcgcgtactgggtgaaaacggccaggaagcggtcggctcaatgggcgacgataccccatttgcagtgctctccagccagccgcgtatcatttacgattacttccgccagcagttcgcgcaggtgaccaacccgccgatcgacccgctgcgcgaagcgcacgtcatgtcgctggccaccagcatcggccgtgaaatgaacgtcttctgcgaagcggaaggccaggcgcaccgcctgagcttcaagtcgccgattctgctgtactccgattttaaacagctgaccaccatggaagaggagcactatcgcgccgacgtcctggatatcacttttgatgccaccgaaaccacgctggctgaaaccgtgaaggcgctgtgcgataaagccgaacaaatggtgcgcagcggtaccgttctgctggtgctctctgaccgcaacatcgccaaaaaccgactgccggtaccggctccgatggcggtaggcgcgatccagacccgactggtcgataagagcctgcgctgcgatgccaacattattgtcgaaaccgccagcgcccgcgatccgcaccactttgccgtgctgctcggcttcggcgcgacggctatctacccgtatctcgcctatgaaaccctggcgaagctggtggataacaaagccatcgacaaagcgtaccgcgcggtgatgctgaactatcgtaacggcatcaacaaaggtctgtataagatcatgtcgaagatggggatttcgaccattgcctcctatcgctgctcgaagctgtttgaggcggtcggtctgcatcgcgaagtctccgacctgtgcttccagggcgtcgtcagccgtatcggcggcgcgggcttcgaggatttccagcaggatctgctgaacctgtcgaaacgtgcctggctggcgcgtaaaccgctggatcagggcggcctgctgaaatacgtccacggtggcgaatatcacgcctataaccctgacgtggtgcgcacgctgcaacaagccgtacaaagcggcgaatacagcgattaccagcggtacgcgaagctggttaacgagcgcccggcggcaacgctgcgcgatctgctgtgcgtaacgccggacggaactaccgtgagcctggacgatgttgaaccagcgagcgagttgttcaaacgcttcgataccgcggcgatgtctatcggcgcgctgagcccggaagcgcacgaagcgctggcggaagcaatgaacagcatcggcggtaactccaactccggcgaaggcggtgaagacccggcgcgctacggtaccaataaagtctcgcgcatcaagcaggtcgcctccggccgcttcggcgtgaccccggcttacctggttaacgccgacgttattcagattaaagtcgctcagggcgcgaagcccggcgaaggcggccagctgccgggtgataaagtcaccccctatatcgccaagctgcgctattccgtacccggcgtaacgctgatatccccgccgccgcaccacgatatttactctatcgaggatctggctcagctgattttcgacctgaagcaggttaacccgaaagcgatgatctccgtgaagctggtttctgaaccgggcgtcgggactatcgccaccggcgtagccaaagcctatgcggatttgatcaccattgccggctacgacggcggcaccggcgccagcccgctctcttccgtgaagtatgcgggttgtccgtgggaactgggactggtggaaacccagcaggcgctggttgccaacgggctgcgccacaaaattcgtctgcaggtggacggcggtctgaaaaccggccttgatatcatcaaagcggccatcctcggggctgagagcttcggcttcggtaccggcccgatggtcgcgctgggctgtaaatatctgcgtatttgccacctgaacaactgcgcaaccggcgtagcgactcaggatgacaaactgcgtaagaaccactatcacggtctgccgtttaaggtcaccaactactttgaattcatcgcccgcgaaacgcgcgagctgatggcgcaactgggcgtgaagcgtctggtggatctgattggccgtaccgacctgctgaaagagctggacggttttaccgccaaacagcagaagctggatctgagcaagctgctggaaaccgcggagccgcatcccggcaaagcgctgtactgcacagagaacaatccgccgttcgacaatggcgtactcaatgctcagctgctgcagcaggcaaaaccgtacgttgacagcaagcagagcaaaactttctggttcgatatccgcaacaccgaccgctccgttggcgcatcgctgtccggctatatcgcccagacccacggtgaccagggcctggcagccgatccgattatcgcccactttagcggtaccgcgggtcagagcttcggcgtgtggaatgccggcggcgttgagctgcatctgaccggcgacgcgaacgactatgtgggtaaagggatggccggcggcctgctcgccattcgtcctccggtaggctcggccttccgtagccatgaggccagcatcatcggcaacacctgcctgtacggtgcgaccggcggtcgtctgtatgctgcgggtcgtgcaggcgagcgtttcgcggtacgtaactccggtgcgatcaccgtcgtcgaaggcattggcgacaatggctgtgaatacatgaccggcggtatcgtctgcgtgctgggcaaaactggcgtcaactttggcgcaggcatgaccggcggctttggttacgttctggatgaagacggcgacttccgcaaacgcgtgaaccctgagctggtagaagtgctggacgttgactctctggccatccatgaagagcacctgcgcggtttaattaccgagcacgtgcagcttaccggttcgcagcgcggtgaagagattctggctaactggccggccttctcagcgaagtttgcgctggttaaaccgaagtccagcgatgttaaagcactgttgggtcaccgtagtcgttccgcagctgagctgcgggtgcaggcgcagtaaggggttaagatgagtcagaatgtctatcaatttatcgacttacagcgagttgatccgccaaagaaagcgctgaagatccgtaaaattgaatttgtggaaatttacgagccgttttcagaaggccaggctaaagcgcaggcagaccgctgtctgtcctgcggcaacccgtactgcgaatggaagtgcccggttcataactacatcccgaactggctgaagctggccaacgaagggcgtatttttgaagcggcggagctatcgcatcagaccaataccctaccggaagtgtgcgggcgcgtttgcccgcaggaccgcctgtgcgaaggttcctgcacgctgaacgatgagttcggcgcggtaaccatcggtaatattgagcgctatatcaacgataaagcgttcgaaatgggatggcgtcctgaccttaccggcgtaaaacaaaccggtaaaaccgtcgccatcatcggcgcgggcccggcggggctggcgtgcgccgacgtattgacccgtaacggcgtgaaggcggtggtcttcgatcgccatccggaaatcggcggcctgctgacctttggtattccggcctttaagctggaaaaagaggtgatgacccgtcgtcgcgagatctttaccggtatgggcatcgagttcaaactgaatatcgaagtgggccgcgatgtacagctcgacgatctgctgaaagattacgacgcggtgttcctcggcgtcggaacctatcagtctatgcgcggcgggctggaaaacgaagacgccagcggggtctttgatgcgctgccgttcctcatcgccaataccaagcagatcatgggctttggtgaaacggcggatgaaccgtacgttagcatggaaggcaagcgcgtcgtggttctcggcggtggcgacaccgcaatggactgcgtgcgcacctcgatccgccagaacgccgcccacgtcatctgcgcctatcgccgtgatgaggagaacatgccgggatcgaagcgcgaagtgaaaaacgcgcgtgaagaaggcgtggaattccagttcaacgttcaaccgctgggcattgaagtgaatgccaacggtaaagtctgcggcgtgaagatggcgcgtacggagatgggccagccggatgcaaaaggccgccgccgcgcggaaatcgtggccggttctgagcatgtggtgcccgtcgatgccgtggtgatggcgtttggtttccgcccacacagcatggaatggctggcgaagcacagcgtcgagctcgattctcagggccgcgtgattgcgccggaaggcagcgacaacgccttccagaccagcaacccgaaaatcttcgccggtggcgatatcgttcgcggctccgatctggtagtgacggcgattgccgaaggccgtaaggcagctgacggcatcctgaactacctggaagtgtaatgcgaaaatccggatagcagcgttatccggctaaatgacgctaagcccgatggtaatcccatcgggcttatttatgcgcttaacaaatcagagcgcactttaatcaccacttttttaatctctgcggactctgttattacgcatccaggcttgtgtggctcacccggcataaacaccaaaaacatccctggcttcaatgtcacagactgctcatgagctatctccgcgcagagttgataatcatcctccgcgcgccattcgtcgcattgccgcgcagagccaatcgtcccataaaaaatccgctcctcacctgtcagcagcagctgaatatcaatatatcgttgatgcagttccgcttttttccctttcggaggaagggggacaaacgccataacgttcataaagagattctcgctacgcagttcatagcggcccggtgccttgtcctgcggcctggcggctaatgccaacgttaacgcttccgccagcaccggatgcaaccctgtatccgccagcgtcccgatatctcccatcagcatcatttatctcctctggctaacaacgccgctcccagcaatccggcatcatgtcgatagtgcgccgtactcagcgttacgtgatacaccgatggttcccaggccaggtacttccgtatccgttccagataaccagcagccatgccgacgctgccgccgaccaccacatgctgacagtcggttattgcttttatatcggcgatcagtcgcgctacgacatgcgcagagcgttcaagcagccccagggcctgcgcatccccgcgagccgcgctggtaaagatggctttcgcatcacagccggcaagcgcgccccgcgcggctgccgaaatccctcgcccggaagcaatcgcctccacgcagcctacccgaccgcagccgcaaagcggtccgtcagggtcggccagcgtgtggcccagatgcccagccaaaccgccggcaccggtaagcaaccttccgttactcaccacgccgccgccaaccccggtggagacggtaataaacgccatatcgctgaccttaccagcaatagcccggtattcagcccaggcagccgcctgcgcatcgttcaccgccagcgtcggcaggtccgttagctcctctaatgcctgcaccagcggaaagtgcataagtccacccagattctgcggattaattgcgaacagatgaccgtcacgaataatacccgtcgaggctatcgcaacgcgcttcgcccgactgtataaaggcccaaccagcattgctaatgcagcgcgtagcgcatccggcgttttgctggcaggggtggaaagttcgcggcggtcgcggatcagcatgtcatcagccaccagcgctgcagcgagctttgtaccgccaatatctatcgccagcgtagtcatggctgagcctcttttaacgccgcgttataccactggcaaatatgttcaagacgggtaatcgctgaaccgacggtcaccgcccacgcccctcggcgcatagcttcagccgcctgagctggcgtgttataacgcccttctgcatttacccggcagccggtttccgtcagcgcttttaccagttccaggtctggctcatccggcgtatatgccgtggtatagcccgataacgtagtgcctatgatttccacgccgagagagtgacaggccaggccatccttcagagaagaacagtcggccatcgctacccgattgtgctgatgaatacgcgccactagcattgacacgggcacaggacgctcacgctcggttccatcaacggcgataatatcggcgccggcctgcaccaacgcatcaatatcttccagatatggcgtgatgcgtaccggtgaatcatctaaatcacgtttaataatgccgataacaggccccctcacccgcgaccgggtcgcgcgtaggttctctacaccttcaatgcgcaacgcgactgcgccggcctgctccgccgccagcgccatcgcagccacgatctccggcttatccaatgggctaccgggtaccggctggcaggaaacaataagaccgccgtttgcgctaatgcgtaaatccagttctttaagcaaagacatactcgctccctgataaatttgttcgcccggcaccaccgccggtctgtcgctatctggtcttaactaatccgcttttgtcaccgctaaaaggcgccgcaccgctcagtggtttaccatcgattgcatcatgagttcgtatcgcttccggacggatccagcgctgtacgcgggacggcatatccagaccaatcaacaggatcacgacgaacgtcaggccaaaagagagtgaacccagcgcggtgcccagatcgagacgctgggcgatcagggcgccgagcactggcgcgatcgcgccgcccagcgcccccacgttgtaggtaaaaccaagaccggccgcacgctgatcggtgtcgaaataaccccctatcagtttcggtaagatcccggagatcccctgccctaacatctgctggaaaaacagtagcagcccaaggacccatatgtttgtgccgccgatagcaaagaccggaataatcaacagctgtgaagccagcagactacaaacgtaggccttacgcgttcccagccagtcaccgagaaacccgcccacgcagcagccgaccgccgcaccaaagccgctgaaaaacagaatcttcgccacagtcgcggggtcataggccagctctgttttcagataagtcggcagcagtgcctggataggccatgaataaaggaaggcgaaaagtaccacgaccatcagcatcacgcccgtaggccagcgcttgccgctgctctgcaccataaagctgataaatatcacggcacacatcacgcccagcagtagcacgataccggcgttttgcaggttgcccgcaaagcagaaccatagcgcaaccgctgccactatggtcattagaatattaataacccgatgtttgccccgataaaggatatcgaccatggtctgtactggcgctttgccctcatgcttctctttccagtcttcagcttccggaatgtttttccgcagccagagagcaaatacgataggtacgatgccgataaaaaacagcgctcgccaaccccaaacgggtaccaccagactgtaaacctgagcagcaatcacagcgcctacagagaacccagagatgagaaaaccgctagccttattacgtaaatgtcggggccagctctcaatcacataagtggcgctggaaccatactctcccgccatgcccataccgataaccagacgagcaataaacatggtggtatagccaggcgcaaaaccgcaggccagagtaccaagggaaaaaagtataatgctgctgaccatagccaggcgtcgaccataacgatctcccatcgcgccgagcatcaggccgccgaaccagcgagagatgaaagccgctgagatgaggctggcagcctgaacggttgtcaggccgaaatccccctgaacttcggtaagtaccagggcgattaatacaaaatcaaaaccatcaagcaaatatccgagccaggcagcagagaacgcacgccactgaggacgactgagatggcggtaccacgggatgttctgggtcgttgcactcattttactctcccgacgattttcgttgtcattccgggagcgcttcgcttacccggtcaggaaaaggtaaatcgctgagcggatagcgttttcgccacccgaccaccgttcagccgcgttcctgcattagctgctgcgccagcgctttcagctccggcagataattttcatctaccggaccaaaaggcttacggcacagcggctcagcaataacatccatatagtgcagcacactcttcaatccacggaatacgccggttttaatcagcagatcgattgccttgttacatccgctttgcaactgctgcgctttgctaacatcaccctctttcaacgcctgtacaatgccctggtaacgccaggccataatgttgtaagtactaccaattccgccatcggcgcccgccaacaggccagaggcaaatatctcatcgtaaccgttgtacagcaccagatccggatgcgctcgacggatctgctccatctggaacagatctcccgaagtctgctttaacgcaccaacgccaggcaaagtcactaacgtattaatttgttcgagagtcagcttaacgccgctgagcgccggaatgttgtacaccaccatcggtaaaccattagcagactcaataatggcccgataatgcgcacagtgttcttcaaaactaaacggataataaaacggtgttacggcggatacggcatcgaagccatagcctgcagcagcccgagccagctgctggctttcgagggtactcacacagccgacgtgggcaatgagagccattttacctttcgcctcctccgccacgatctccagcacttcctggcgctctgagccgctctgaacaaaggcttcaccggtcgagcctcccacatatagcccatcaactccctggctcagattaaaacgaaccagccgacgcaggctgtttttatccagtttttgttgactatcgaatggcgtaagcaacgccgccataaccccacgtaaattaactgccataacgacctcatctgaacttttacgattaactatgtacctttatacctgttataccagatcatttaataagcatagtaacagagatcgcttataatgcgatctgcttcactaaacgctcgtcatgagcgaggggatcgtttgcggggctgagctttctgaccgaaggcgtgccaggtagcggatacgctgttgagatgggtctgtagggcgcgatcggcttcatcaggatcgcgacgacgaatggcgtcaacaatagcgatatgctgttgatagctcacgctgttatgttcgtgcagctcacgttctggcaccttaggccgggccgcgattagccagtccagcagtgccacatgaatagccataaagattggattaccggggatttccgccagcacccggtgaaattcaacgtcagaacggataaacagggcattgtcatcaagcgactggctgttaatttttagcgcctgagcgagtttttcaagctgcttttcgctggcatgctctgcggcatagcgcaccagactcgactcaaaaaacaggcgcagctgttcaaagtgcgctattccgcccgggtgcgataaaaaatctttcgccatgccggagagctcaccaatgatggtatctgcagaaggccgcgacacgcgggcgcgctcgccgttattaatctgcaccagccccttgcgtttcagcgccgccagcgcttcacgaaccgatggacgtcccacgttaaaaaacgtcatgagctcacgttccgacggtagctgctctccttccgcaaactcccggcgccgaatcatctgctcaagctcttcttccaccatttcagacagctttttgcgcgccagaggacggcggcccagagtgttgccaatggaggatggggtatcttcggcttgtggatcaaatgcgctcatagggaccattgtgtgatttgtgacagcacgtgacggctgctccattttaacacaggaattttgctgagatcataaaacaggccccgaagggcctgataaacattatttaacgacgcgcagcgccggacgcccgccgcgaggcggtggcgtatcgtcgggatcgtcgtcgtgattatccggcttatcgccatcgatcaccgacatgaccgtttcgctgtcaggcagctcttcgtcatcgttcaggctagtgacatcttcatcataagccgcttctggttcgaacatggttcccgcaccattctcgcgcgcgtaaaccgccagcacggccgccatcggcacggagacattgcgcggcacgccgccaaagcgcgcgttaaaacgcacttcgtcgttggccagttcgaggttaccgacagcacgtggggcaatattgagaacaatttgcccatcgcgagcgtactccatcgggaccattacgcccggcagagtgacgtcaacgaccagatgcggagtcagctggttatccagcagccactcatagaacgctcgtaacaggtacgggcgacgcggcgtcagctgtgatacatccatcatttagccccgaccgagacgcatttcacgttcggcttcagttaaagaagcgaggaaagagtcgcgctcaaacacgcgagtcatatagcctttaagctctttcgcgccagcaccgaccagctctacgccgagaaccggcagacgccacagcagcggtgccagatagcagtctaccaggctgaactcatcgctcaggaagtagggcttctgggtgaatactggcgcaatcgcctgcagttcttcacgcagctgcttacgcgcagtatcagcctgcgcagcggtaccggtctgaatggtattcatcaacgaataccagtccttttcgatacggtgcatgtacagacggctttccccacgcgccaccgggtaaaccggcattagcggcggatgtgggaaacgctcatccaggtattccataatgatgcgagattcccacagagtgagctcacgatccacaagcgtcggtacgctttgattcgggttgaggtcaatcagatcctgaggcgggttgtccttctccacgtgctctatctcaaaactaacacctttttcggccagcacgatgcggacctgatggctatagatgtcagtaggaccagaaaacagcgtcattaccgaacgtttgttggcagcgacagccatgaaaacctccaggtatattcagaatttttgtactgctgccgaccacgcatggccagccagatgtaaaaaccccatttgcgtgacttcatttcgttcgtcatccaaacaaaaaatgaacaatcacctgcatttgggcagaaaattggatgatagtttaccagattttgaagacgttgtggtgaggggattctggaaatgctgaaaaagtggtaataatggggcgtttgtagagggaaaatggcaaatttatccataaaaaaacccgccgaagcgggttttttcgtaaattgttctgcgtgagcagaaaacaattaacgtttggagaactgcggacgacgacgtgctttacgcaggccgactttcttacgttcaacctgacgagcatcacgagtaacgaagccagctttacgcagttcgccacgcagggactcatcgtactccatcagagcgcgggtgataccgtgacggatcgcaccagcctgaccagagataccaccacctttaacggtgatgtatagatctaatttctcaaccatgtcgaccagttccagcggctgacgaactaccatgcgggcagtttcacgaccgaagtactgttccagagaacgctggttgataacgattttaccgttgcccggtttgatgaaaacgcgagctgcggaacttttgcggcgaccggtgccgtagtattgattttcagccattgcctataatcccgattagatgtcaagaacttgcggttgctgtgccgcgtggttgtgctcgttacccgcgtaaactttcagcttacggtacatagcacgacccagcgggccttttggcagcatgcctttaaccgcgatttcaatcacacgctcaggacggcgggcaatcatctcttcaaaggtcgcttctttgataccaccgatgtggccggtgtggtggtagtacattttgtcttcgcgcttgttgccggttacagcaactttttctgcgttcagaacgatgatgtaatcaccggtatcaacgtgcggagtgtattccgctttatgcttgccgcgcaggcgcagagccagttcggaagccagacggcccagagttttaccggtcgcgtcaacaacataccagtcgcgttttacggtttctggtttagctgtaaaagttttcattaaaagcttacccaaataaataagttacacgttggtgaacacccaaacgtttagtcagttgaggttcacacgacattgtccagcaaacctaccccttcgaatagcctatgccggcacatagaaagttttgggaaaaaaaccttctcgtaacgtggggtcgcaagattatagagaagtcggggtcaaagatcgacccctttatgtgatttgtccccggttttaccccgccaggtgttcccgcttcagatactcctcgctctgcatctcctgcaggcgcgataaacagcgctggaactcgaactttaatctctcgccctgatagatctcatacagcggcaccgccgcgctgaccaccagcttgacgtggcgctcatagaactcatcgaccagggcgataaagcgccgcgcctcgctctccatcagcccggtcatcaccggcacatcaaagagcatcacggtatgaaacagacgcgagagcgcaatatagtcgtgctggctacgcgcatccacgcacagcgtggcgaaggaagccgccagcgtctggttctcaacgcccagcgtcggcagcgggcgatggttgatctccagcgttggcatctgctcgcgcttcgcccccgccagcgccagccacagtttatccatctgctgctgcgtctcagcgttcagcggcgacagccacaaatgcgcctgggttagcgtgcgcaggcggtaatcaataccggcgtcgacattcatcacatcgcaatgctgtttaatggcgtcgatggcgggcaggaaacgagcgcgctgaaggccgttgcggtacagctcgtcaggcggaatattcgacgtcgccaccagggttatgccgcgggcaaatagcgctttcatcaggccgcccagcagtattgcatcggtaatatcagaaacgaaaaactcatcgaagcagagcacatcggtttcagctttaaagcgatccgcgacgatttccagcggatcgctgtgcccctgcagcgtcgttagctcttcatgaacccgcagcataaagcgatgaaagtgcagacgttgtttacgttctcccggcaaactttgatagaacagatccatcaaccaggtttttcctctgccgacgccgccccacatatagaggccgcgaacggcagccgcttcggcaacgggttcgcgcttgcccagcagtttgccgaatttggcccgcagaccgccgccggtttgcggcgcgaccgaaggtttattctgcagttcttgataaatcgtatcgaggcggctgaccgcttctcgctggacgtcgtcaggttgatggctcccctccttgagagaggaaaggtaacgcgatgttggggacaggctttgcatgatctaattgttattccttgaaaaccgtaatgccgtagctcacgattgacgaaaaaaaggccgctctacactacgtgatgatacgccaggattccacttctgtggaattagcggttatagtggcactatcgggcgcaggcggagagcctcacagccaccctacggaaccacaaaacaacgggagatgttcatgacctgggaatacgcgctaattgggctagttgtcggcatcattatcggcgccgtcgcgatgcgttttggcaatcgcaaattacgccaacagcaggcgctgcagttcgaactggaaaagaataaagcagagctggaagagtaccgcgaagagctggtgagccattttgcccggagcgcagagctgctggataacatggcgcatgattaccgccagctgtatcagcatatggcgaaaagctccaacaacctgctgccggacagcatggcggacgccaacccgttccgcaatcgtctggaagaatccgaagcgggcaacgatcaggccccggtccagatgcctcgcgactactctgaaggcgcatccggtctgctgcgcggcggcgtaaagcgcgactaaaccggcaacgacagtaaaaatattttccgggcgcaccctctgcgcccgtttccaccttccatcccagctacaatttaacgattgcccacgttgttaccgggtcgaaaattcaataacatcgggccattcgggacgtttcccatacaccataggttacgagagccagcaactaatgaataaaccgactttgctgttgagtgcgttagcgttaagcattgggttgtcgttgtccgccttacctccggcagcagcgtctttaccgacacaggttcccggtcagggcgcgttgccaagcctcgcgccgatgctggagaaagtgttgccggcggtggtgagcgtacaggttgagggtaccgcgtcacccgcgcaaaatatgccggaagagctgaagaagtactttggcgacaacgcgccgcaagagcaggcgcagccttttgaaggcctgggctcaggggtcattattgacgccgcaaaaggctacgtgctgaccaataatcacgtcattaatcaggcccagaaaatcagcgtccagctcaacgacgggcgtgagttcgatgccaaactggtcggcagcgacgagcagagcgatatcgccctgctgcagttgcaaaaacccagcaacctgacgcaaatcgcgatcgccgactccgataaactgcgggtgggcgatttcgccgtcgccgtcggtaacccgtttggcctgggccagaccgccacttcagggattatttcagcccttggccgcagcggcctgaaccttgagggactggagaactttatccagactgatgcctcaatcaaccgaggcaactccggcggcgcgctgctgaacctcaacggcgagctgattggtatcaataccgctattctggccccgggcggcggcagcgtcggcattggcttcgcgatccccagcaatatggcgaaaatcctctcccagcagcttattcagtttggtgaaatcaaacgcggcctgctgggtattaaaggtatggaaatgagcgcggatatcgccaaagcgatgaaccttgacgtccagcgcggcgcgttcgtcagcgaggtcctgccaaactccggatcggccaaagcgggaattaaatctggcgacgttatcgttagcctcaacggtaaaccgctcaacagcttcgccgaactgcgttcacgcatcgccacgaccgagccgggcaccaaagtgaagctaggactcttgcgcgaaggaaaacccgttgaagtggaagtcactctggacaagagcacctcttcttccgccagcgccgagcttatcgcaccggccctgcagggcgcatcgttaagcgacggtcagatgaaagacggaaccaaaggcatcgtcattgataatgtcgataaaggcagcccggccgcgcaggcgggcctgcataaagacgatatcattattggcctcaaccgcgagcgcgtgcgctccattgccgaactgcgcaaagtgctcgaaagcaaaccgacggtgattgcgctgaacgtcattcgcggcagcgaaagcatctatctgctactgcgttaactcgccttccgggcatcgcgtgcagtgcgatgtccggacaagacgtgttatgctgcgcctgtctatccatcaacgatatctgcatcatgcctggaaagtttttacgttcgatacttatcggtttgattgtcggcggcctgctgctggccgttatgccttcgctgcgccagtggcagctttcgccgaccacgcagtacgatagcgcggatgaattccccgccagctataattccgccgttcgccgcgccgccccagcggtcgtgaacgtctataaccgcgcccttaacagcaccagccataaccagctaacgctcggttccggcgtgatcatggaccagcgcggctatatcctgaccaataagcacgttatcaacgatgccgaccagattattgttgccctgcaggatggccgggtctttgaagcgctgctggtcggatccgatactctcaccgatctggcggtattaaaaatcaacgccagcggcggtctgccggtcattccgattaatccgaaacgcgtgccgcatatcggtgatgtcgtgctggcgattggcaacccgtacaacctcgggcaaacaattacccagggtattatcagcgccaccggccgtatcggcctgaaccccaccgggcgccagaacttcctgcagaccgacgcgtcgatcaaccacggtaactcaggcggcgcgctggtgaactcgctgggcgagcttatgggtatcaacaccctgtcatttgataaaagcaacgacggcgaaacgccggagggcatcggctttgcgatccccttccagctggcaaccaagattatggataagctgatccgcgatggccgcgtaattcgcggctatatagggatcagcggccgcgaaattgcgccgatgcatgcgcagggcggcggcggtatcgatcagctgcaggggattgtggtgaatgatgttgcgccggaaggcccggccgcccaggcgggtatccgcgccaacgacgtgattatttccgttaacgacaagcccgccgtttccgccctcgaaaccatggatcaggtcgcagagattcgtccgggttcggaaattccggtggtgattatgcgcgacgataaaaaaatcacgctgcatatcgccgtacaggaatatccggcaaccaattaacaggctcccccgccgggggagcacctttcaatcagcaaatagcggcccggccgggaatgtcgccagaaacccggttatggccagcagcgaccgcaggtcaggccacgcaaactggcgctcccgcagctcgtcatccagcgtcatgagcgcaaactcgcctttatcccccagaacgccgccctgccagagcaaccgttgagcctgctgccgggcccagggggaatcgctcttccaggccagcaggtgcagcagcgcctgctgcagacagatgccagaaggatgcttatcccgcagcagccgccggtaaaccggcagcgatatgctgcgtacggtataaaaaccgctgcgggtttcggcatcagcatccgccacgctggcgcaatactgaccggccagatcgcatagacgattgtgcgtcagcggctggcccagggcgttcaggcgacccgctgcggcacacagcagcccacttctttgcatccacggcgtggagtcccgaaataccacatcaggtagcgccggttctgtttcagctgctttattttgcgtacccgcctcatagcaatggacaaaaaaatcatggcctccgcgggcaactgatggttgcgctaacaggttaagcgcgggctgcagttgttcaacttcatctactgatgccagcatgtaatcgataatgacatcttttgtcgatgccctgctttcggggcgtaatgttatggtttcattcatcaaagcctccttataggaaatctcccggtggcgctgcgctgaccgggctacgggtccgtgcagtctggtagcccggacaaggcgcgttaagcgccgcctccgggataatccccgggtcgcggctgacgccttacccgggctacaggtttacagccgtctgcgatccggtagcccggacaggcgcagcgcgccgcctccgggaaaggtaacgattcacatcgccagcacgtacttgagcatcaccccggcggcaatcgccgagccaatcacccccgccacgttcgggcccatcgcgtgcatcagcaggaagttctgcgcgtccgactccagacccactttgttcgacaccctggccgccatcggcaccgccgacaccccggccgagccaatcagcgggttgattttgttccggctgcacaggttcagcagtttcgccatcagcacccccgccgccgtccccacgcagaacgcaatcacccccagcaccagtatccccagcgtctgcggctgcaggaacttgtccgccaccagcttggcccccaccgacagcccgaggaaaatggtcacgatatttatcagcccgttctgcaccgtgtcgctcaggcgctccaccaccccgctctcgcgcatcaggttgccgaagcagaacatccccagcagcggcgccgcgtccggcagcagcagcgccaccagcagcagcagcaccgccggaaagaggattttttcccgcttactcaccgtgcgcagctgcaccatacggattttccgctccttctcgctggtcagcgccttcataatcggcggctggattaacggcaccagcgccatatacgagtacgccgccaccgcgatggccccgagtaattccggcgccagcttgcccgacagataaatcgccgtcggcccgtccgcgccgccgatgatgccgatggccgccgcctgcggcagggtgaagctgatgatgccgaagtagttcagcgtcagcgcccccagcaccgtggcgaagatgccgaactgcgccgccgcccccagcagcagggtgcgcgggttggccagcagcgggccgaagtcggtcatcgccccgacgcccataaaaatcaccagcggagcgatacccgagccgatggcgaccttatagaagatggccagcaccccggcggagtagcccatatccacggcgagctcctccatctgcccctgcaccgacggcagggccagcgccagcgcctccctgatggcgtggacatccggcgtacagtggagcttcgcggcaatcaccgccagctgcccggcgtcgtggtgggccagcaggctctccagggcggtcagggccagcccggcctccgggatattcgacagcaggccgccgaagccaatcggcagcagcaggagcggctcgaacttcctggcgatggccagccacagcagcagcaggctcaccagcagcatgacggcctggccggcgccgaggtgcatcagccccatgccctgaatcagggcgttcagactttccatttcgcgtcctcttccttacgccaggctcagcagggtgtcgcccaccgccaccgcgtccccggatttcaccgcgataccgcgcacggtcccggcctgcgcggcgcggatttcggtttccatcttcatggcttccagaatcagcagcacgtcgccctcggccaccgcctggccctcgccggcgatgaccttccagatggtgcccgccagcggcgcggtcaccgggggtgccggcgcctgccggggcggctgcgggggccgtggcctgaacgggggtcgctgccgtcagcgggctgatatcgccgccgtcgctgaccttcaccacaaaggccttaccttccacttccacggtgtagacgccggaggcggccggtttctctgctttcaccgccggtttgacctcttcagcctgcggcagcggctcgaacgccgccgggttgtggcggttctcaaggaacttcaggccgacctgcgggaacagggccacggtgagcacgtcgtcgatggcgttgtcggccagctgaatattcttctcctgcgcctggcgcttcacgtcggcttccagctgcgccagctccggcttcagcaggtccgccggacggcaggtgatggcctctgctccgtccagcacgcgcgcctgtaatgccgcgttcaccggcaccggagtgtggccgtactcgcccttcagtatcccggcggtctccttcgcgatggttctgtagcgttcgccggtcagcacgttaagcaccgcctgggtgccgacaatctgcgaggtcggagtgaccagcgggataaagccgaggtcctcacgcacgcgggggatttccgccagcacctcatccagacggtgggcggcgttctgctgcttcagctggccctcaaggttggtgagcatcccgcccggcacctgggccacgaggatacggctgtcggtgcccttcagctggccttcaaaggcgtgatatttcctgcgcacctcgcggaagtacgccgcaatgctctcaagcctgaggatatccagcccggtgtcatgttttgtgcctgccagcgtcgccaccagcgcctcggtggccgggtggccgtaggtggcgctcatggaagagatggcggtatcgacgccgtcgacgccggcctcgatggccttcagcagcgccatctccgccatcccggtggtggcatgagcatgcaggtgcagcctgacgtcatagcgttttttgatttcgctcaccagctcgaaggccgccatcggggtgagaatgccggacatgtccttaatcgcgatggaatcgacgccggtctccagcagctgttcggtcaggtcgagccaggtctgcagggtgtgggccggactggtggtgtaggagagcgtgccctgggcgtgggcgccgtggctgcgcaccgcctgcagggcggcctgcatattgcgcgggtcgttcatggcgtcgaagacgcggaacacgtccatgccgtttttgacggcgcgctcgacgaagcgctgcaccacgtcatcggcgtagtggcggtagccgagcaggttctggccgcggagcagcatctgcagcggggtcttcggcatggcctttttgagctcgcgcaggcggacccaggggtcctcgccgaggaagcggatgcaggcgtcaaaggtggcgccgccccagcattcaagggaccagtagcccgcgtcatcgagggcggccgcaacggggagcatatcgtcgaggcgcaggcgggtggcgaaaagggactggtgggcgtcgcgcaggacgacatcggtaatggcaacggtcatggattcctccgtgaattaagggttaagtcggcgatggtggtggatagcggcggcaatcaccggctttaagcgggcgaagtcgtcagcgggcgctacggcggcgggtgcggccttcggcgcgggagccggttccgggaagaagcggttgacggcggcggacatgccgcggatggcgaaaatcagcagaaacagaaacgccagcacgaaccccatgccgagaaacatcagggtgaagccttcacctaatagcagtgctgcatcagtcataaaatagccttcaggcaggaggcacgataatggtgctatttatgacgaagaaataacaagggtggatttccctgagccgcccccggccagaacccttggttattattatcgtcataacgcattaccaccattaccgtgcaatttacgtaatcaggtttatttgatgaaacttacgttctggcatatttcatcagcgacaatctctttacgctgattgaaaataactttgttctgttcaaacaggttattaccatgagtatcaatagaaacaattaacgggccaaactctttcacccgacatacccacagcgtttccggcatccccagatcgcgccactgcgcatcttcaatttcttccacgcacaccgcggctactaccgcgcagccggccgggaatacgcagtgcagcgctttatgctccgcgcagccctcttcagtgcccttccccataccgcctttaccaacaattaatttcacgccggtctttgcaataaattctttttcgaatttttccatgcgcatgctggtcgttggtccgacggagaccatttcaaacttatcgtcttcgcctttaatcggacggacaataggcccggcgtgtaaaatagcgccgccgctaacatcaacgggtaattcacggccaccttcaattaagcgacggtgcgccacatcacggcaggtaacaatatggccattgagataaataatatcgccagctttaatatcggctaaatcttcatctttaattggcgtagtaaggatttttttcgtcatcagaaattcactccgctgtgagacataatggtgtagttcaagtctttatcaaaaacgatatgccctttccggtgcgaccagcagcccacgttcaccgccaccccaatggtggaaggatgacgcgcggtgttttcaatattcacgcccataacggaggtattaccggacatcccctgcggcccaaggccaattttgttaataccgtcttccagcattttttccagcgaggccgcacgttcattttcattatgcgaaccgatcggacgcatcagcgcttttttcgacagcagcgccgccgtttcaacggaggtcgccacgcccacgccgaccagcagcggcggacacgcgttcaaaccgtagctggtcatcacgtcgagaacaaagcgggtaacaccttcataacccgcgcccggcatcagcaccatcgctttccccggcagggaacagccgccgccagccatataggtataaatgctgcactggtcagaattggggacaatctcccagaacaccgtcggcgtgcctttacccacgtttttgccggtattgtattcatcaaaagtctcaacgctgttgtggcgcagcggggaatccacggtcgctttaatcaccgcttcacgcagcagcgcttccagctcgccgatcagcgggaagttagccccgcactccaccagaaactgaatcacgccggtatcctggcaggaagggcgatccagctcctttgccagacgctggttctcaatcatggtcgtaaagataacgtcagccagtttactggtctctttcttatgcaaatcttccagttttgcagtgacgtcatcaggtaagactttgccggtataccccacaaatttggccatcacattggtcatatgggatatctgttcacttttgctcatacaggctccttagtcaggacagcttccgttcattacggatgaaaagggaaaaggattggcagcagaatcaggctgacaatggtggaaacgataatcagagggatgccggatttggcgtagtcgacaaacttatagccacctgccgacagcaccatcatgttggcaggcataccgattggcgtagcgtaggcgcaagaactgccaataaccgtcgccattagcaccgcacgaggatcggcgcccatgcccgcggcaatcgacaggctcaccggtactaacagcgcgacggtcgcggtgttggacatgaagttagtcataatgatggacagcgcaaagaccaccaccagcagcataaacggcgaagagttttgccccagcatgccaatcacgtgatccgccaccagttttcccgccccggtcatttccagcgctttcgccagcgccagcgtgccgccgaagataaaaatggtctgagaatctatggctttataggcctgcttttctgtaagtacgccggtaaccaccagcaccagcgcgccgatacagcccgctaccgccagactcacaccggtctgcttttcgaaaatcatgccgaggatcgtggcgatcagaacaaccaaagagaggatttgcttccagcgcggaacgtggctgtaatcgcgctgttcaccgatgctgccaactgcaccgctgttcgggtgattgggcaggaatttatagccgatggtcaggaagtaaataacgccgcaaatcagcatcggtaaaccgactttggcatattcaaaaaagccaaaaccgctgccaatattctgcaaagctgactgcgcaatcaggttgcccggcgcgccaatcaacgacaggttaccgccgagcgcggcggcaaaaaccagcggcatcagcaaccgggaacgggcaaagcctgatttcgccgccacgccgataacgaccgggatcagtacggctgcggtaccggtattggagagaaaaccggacatcacgccaaccacaaccataatggtaaaaatcagctgtttttccgttttcgcgaagcgcgtaatcacgccccccaccttattcgccattccggtttcaaatagcgccccgccgacgataaacatggcgacgaagagaataacgttggtgtcgataaagccggcgaaagcctgcttgagattgagcacgccggtgagcaccagcacgacgcaaaccaccatagacgtgaccgcaagggggattttttcccacacgaacatggcgatagcaaacaccagcaaacatagggtaatggtaatcggttccatatttatagttatcccatcaatgatatatgatattgtatccaatattgacgaggggaaattattcccatacaaagagtaagtcaacgcgtttttttcgaaagcttcaggattgagatctttatcaaaatctcgcgaaagcagtcacttatcgaaacttatttatgaaatgaataagtaagacgcctgcagcgatcctacaggcgatgcgatcaagcggagggttcttcgacgtagcgcgttagcatgttctccatcgaacggatgatatgctcgcgcattcgctggcgcgccagcgcttcattatgctgctccagggcctgtaaaatccccttgtgctcgcggatggaaatgatcgcgtactcttcctcagtgaccttatgccccatcgaaagcccgttccacatattgctgagcagcagcttcattttgccatttcccgccgcgttccatatctccatatgaaacgcctggttcaggtctgaatattcagctgagttattttccgccagcgctttttccgcagagtaatgcacttcggcaatgcgcgaaatgtccgtcccgggacggcacgctttagcgactgcttcactctccagcagcgcgcgaatctcataatgctcgcggatcgtttgttcgttaattcccagcacgaccgcccctttattgggccggactttaatcagcccatccgcagccagtatctgaaatgcttcacgcacgggcatactggacacgccgaccatggtggcgatcccttcaagggtaatttcttgcccttcaactaaatctcgcgacagtatagctttacgtaatactgccgcgacctgctctttcgctgaaagaagcttaattttccctaatcgaggcttctgcactttcccaatccttcatgtgttgacgcattatttctgccagagagaggaaataacgctgcgtttcctgcgcgatctcggcgcgatcgccctgacgaatagcctccatcagagagctgagtatttgcgccgactcctgattatcctctttcagatacagaatgacataaccgatataaccatccaaaaactgctgataaattttttccagatagcgattatcaatataagaaatgagcgtctcgtggaacgccagctctcgcgctcgctcaccgggatgccccagcgcgcgcgcgctggccgccagcgattcgcacgccgctgcgggtaccaatgaaaaaagctccgttgccatcaccgcaatggcccggaaaatatgactgacgtggtcaggcgccagcctggcgacctgcatatggcggtttggcaaacgcaccagaaacccttcctgctcaagggcctgtagcgcttcccgaaccggcatacgagaaagccccagctgttccgcaatactctcctgcgcgagttcatcccccggtttcatgctaccggaaaggatctcgtaacggagcatttgcgtaatgtggtccctggtctgctttctttcgatttttttcacaacgtcctcgtttattaccgctcaagacgcggggagtttagcagatttaccagcaggttgagtcattcaggggtgggagaaagccataaaaaagccggaacccaggctccggcttttcttttcatgaaacgttatttattcacaaagtcttcgccaagggcgatatctttcttcagcgtatccagcatcccctccagcgcctgctgctcaaacgcgctcagcgtgccgatagactgacgctgctctacgccatttttgcctaacagcagcggctgtgagaagaaacgggcatattgaccatcaccttcaacgtaggcgcattccactacccctttctctccctgcatggcgcgaactaaggagagaccgaatcgcgcggcggcctgtcccatcgagagcgttgctgagccgccaccggcttttgcttccacaacttcagtaccggcattttgaatgcgcttagtcaaatcggccacttcctgctcgctgaagctgacgcccggaatttgtgacaataaaggaaggatagtcacgcctgagtggccgccaatcaccggaacctcaacctctgatgaagatttgcctttcagttcggcaacaaaggtattcgagcggataatatccagcgttgtaacgccaaagagcttgttcttatcgtaaacaccggcttttttcagcacttctgcggcaatcgccacggtggtgttcaccgggttggtaatcaccccgacgcaggcctgcggacaggttttggcgatttgctgtaccagatttttcacaataccggcattaacattgaataaatcggagcgatccatgccgggcttacgcgctacgcccgcggatatcagcaccacatcagcgccttccagcgcaggggtggcgtcttcgccggaaaaacctttgatttttacatcggtagggatatggcttagatcaaccgccacgcccggggttaccggagcaatgtcgtacaacgagagttctgaacctgaaggcagttgggtcttaagtagtagggcaagcgcctggccaattccaccagcggcgccgaggactgcaactttcatcctaaactccttattatggttaaaatagtctttcgttactccgtcgcctggaccttaattcacaagatgaacaattacaataattatggctgaagaatgcgtggtcgtgcgcagcgatgcagcagcttcgcattttcctccctgagactgaccatccagcaaagcgtagtaccggatcgactgttggttacaatacacccagcgtattgagcagaacaacatcatttaataacatttcatttacttttgtggcaatttgcgcgccgtgacgaaagcatgttccttattagtgttttttgctaaaatatgcgcccttcataacattatttacgcttctcccctgcggattatttgcataaaaatgcatgcttatgcataatgatgttgtttttaccaccataattgggtgacttatgcgtagttcggcaaaacaagaagaactggttaaagcgtttaaagcgctgcttaaagaagagaaattcagctctcaaggtgaaatcgttcaggccctgcaagaggaaggcttcgataatatcaaccaatcgaaagtctcacgtatgctcaccaagtttggcgccgtacgcacgcgtaacgccaaaatggaaatggtttactgcctgcccgccgagcttggcgtcccgacgacctccagcccgctaaaaaacctggtgctggatatcgattataacgattcggtcgtggttattcataccagcccaggcgcagcgcagctgatcgcccggcttctggactcccttggcaaagccgaagggattctcggcagcattgcgggtgatgacactatctttaccaccccggccagaggttttaccgttaaagagctgcatgacgccattctcgtcctgtttgagcaggaactctgatgcccttccctctggttagcgccagagggtatcccttcaaaaaattatcatttctttaacattttgtgtgtttttccgcttctatacattcatttacgtgatgaaaccggcttaagcgcacaaaagatcaaattcacctatcattatgattttattagcaataatgaccacacgtggcgaagaaaagacatttctaattcttatatgttataaaaaagacatttctttgtaattatttacatgaaaaacaattagcaaggtattaattttttctgtgattagtgtatacttgattttgtgatgagggtcacgaaacaaaggccccaacaaaaagattcgacgaggtgaacatcatgaaaatcaaaaccactgtagcagcattaagcatcctttccgttctgtcttttggcgccttcgccgctgactctatcaacagcgaacaggctcaaggccgtcaggcaatcggcaccgtttccgtcggcgcggtaagttcttccccgatggatatgcacgaaatgctgaacaaaaaagcacaagaagaaggtgcttcttcctaccgcattattgaagcacgtaccggtgaccactggcacgcaacggctgaactttataaataagatttaacgattgtcggtcattaactgaaacagaatctctccagcggccccaggttcattaagcctcccgccgctgcaaatatgaaggttggagaaaaaattatgaaaagcgcaattatcatcgcatccctgggtctggcttccgttctctctttcggcgcaaacgccgccgttaatcaagtgaacgccgaacaggcgcaaaatctgcagtccatgggcaccgtttccgtttctcaggtaggcagcgcgccgatggatatgcgtcaggaactggcggctaaagctgagaaagaaggcgccagcagctaccgtattattgaagcccgtaccggcgataactggcacgctacggctgagctgtacaaataaaccctcgtcgtcttatccgacgacttgcccccgctccgtcgggggcttttttatgactgccgcacattaaaacgcagctccccttccagctcctcttccgcctcatcaaagagcagaattaacgcgccgaaacgccgccgctgattatcgcttaaatgaataaactcaatctccagcggtaagggtaacagcccggcggtcacggcctcccacagagaatccaggttattcactttctcacgcgctaaagcaaaggtacgagaaaactcacgataaaaatcctgctgctcagctatttcatcaaaatcaaaggtataggtagtcattgcccgcatcccgtccacacctgcaacttttcatagcccggtcatcccggcgtgtagttccactctgacggcggaattcatactctgagcgttaagtatagcgataaaaaaaccgacgcttcggcgtcggttctggcggttagctgttggttaacacatgctggtacttatgcagcatctccaccagcctgcgtaccggctcggtcacctgcggagaggcttcccaatgctgtaatttttgctggtagatatccagttcatcaagcaagcgggcaaaatagtagcggcgcttatcatcactactggctgaaatgacgcgatccgcggtacgtcgcagctgccggtgaaaggccgacagatcgtcatttatcggtaccggcgcatcgcgcagacgctgatgcgcgataatcagggtcagcgccagacgaaagcgggcgatatcgccagggaatttattcagcaacaaaaagagctgacgatacagggccggcaagtggttctctttacgtcgcgccatattggtggtcagcgatgataccgccgccgagacaaactggttgagcagcacgcggccggtacgggcctgcgaattatcacgaaccagcaggatcaccatcagcgcaaggaagcatccgacgatctggcccagggcactatcaagaaactggttgaattcaaacttcatcggattgtcgagcaccagaatattaatggtgctggccagcgcccccagcgagcccagccgccgcttttgtacctcgatgccgataaaaaaggccatcaccgccaggctgatacacagcagcagcatactttgctgcgtcgcgggcataatcacgaggaaaaacagcgcccccagcggtaacgccgccaacgtgccgtagaggaaatctatagctaccatccgcggattaggtaaacgcatcgctaaggccgtgacaaccgcaatcatgaccatcgccccgcttcctgaagtccagccggtccacagccagaacagcgtaccgaggatacaggagatagacgtacgccaaaagttgaccatcgcatggtgccgctcggcggattccgccttcaccaccacttcgccttgcagcacttcttcttcaatacggctgattttggtattgccgaccacgccccgcttcaaaagcagatagcgcgtcgcagcgcctacccagctgtagattgttaccggcgtattgtgctctcccttccaggtcaagaagcggcgcatccgctttagctggcggtgcacgtcctgcacggtctcgaccggttcagcaaacagctcgcggtaatcatccgtcaccatctcaggccgggtattctgaatcaaataggtttcacaggcctgagtaattaaggtcagagagagggtattgatcgccttcagccgctgattcacttttgcccagcgcgaggactccatgatcaagttgccgcgcatcccttccagcccgttggtacgacgcaccagcgcgctccaggccttatcgacgtcatctttatcaccatgcgccacgcaaagctgcatcaggcgatagtgatcgatcagcagattatccagttcaaggtcgatctcttttttaatcgaacgcggagaaaacagcaggtcggccacaatggcgctgacgataccgatgacaatctcactgcatcgctcaacggcgaactgcggcgccagcatcggctcttcatgaatagtgataataatgataagcgcggtatagcccgccaggccccaggcataggagttctcaacccgcaccagcgaggagatccaggtgcagaatccggcccacaggcagcataccagcaccatcagcagcggggcgcggatcatcaggatgatgatcgccagcgcggcgatacagccgataaaggtgccggcgatacgcagcatcccgcgatagcggatcgccccggagtaaggctccccgcctgcggcaaacgccgggccggcagcaacgatggcggcggtaagcaccgcccagcgcggcgtttccagctgaaaatgaaaaccgacgaataacgccagcaccaccgcgcaggctaacttaacggcgaagcggagatgccggagttcgatggtgaagatccccatggcgattaaccgaactcacgcaggcgcatcgccagtttctggaagaagtttgcctggcgagtatcgcgatcctctttaccggtaatcaccaccgtcgcggtggtacccgctggccagagattgccctgctgttgatcgaggcgaatacgtaccggcacccgctgtgccagacgtacccattcaaggttagaatcaatagaggccagcccttttgaatcgctgctgctgctggcattggtgacgcctgcagcaatgctgtcgacggtgcccctgagggtgtgtacgcttcccagcggggtaatttcagcacgaaaaccggggcgcacgccctcaagcttggtctcttcaagataggccataacatagaaggtattctgcttcaccagcgcaaccgcggtggagcctcgggtgataaactcgccgcggtaaacgttcaggttggtcacccagccgtcggccggggcgcgaatcaccgtacgttcaaggtcaagcttcgccaggtcgcgacttgccgtcgctttggctaattgatgctcaacggtttgcagaacgttattcgcctggtctatctcttcccgggacatggcctggacgccaaggcggttacgacggccggcttcgacgcgtttctcctgcgccagagtctgatagtaggagacatcggcttcagcctcggctaacgccttctggtaacgcggctggtcaatgacgaacaaaacctggtctttcttaaccagttggttatccttgatattcacctgcgaaatcaggccggagacatcgggagcgatggccacaatatccgcactaaaacgcgcatcgcgcgtccagggcgaggcggtgtaatacacccatgcgcgaaaaatcgccataaatgcaaggataaccagtatcacagtgattgcggtacggaggatatttcttgttagtgttttcacatcaacctcaaacgaacaaacgtgatatcagataaaacaggcagcaatatagcgcggtattaaacagtgccgggtgccagacaaaatcatagatgcccgttggaaccagcaggcggtgcaccagccagaagatggctagcgacaatagcaattcaaagaagatcggcggaaacgacaagccgaaaatcacaatgacaggaaacagactcatgatgaccttgataagaagcgtacaggtgatatgcgcgatgcgtttattattaagctaactatatagtaacgtaacaattgcggtcttatctataatgtgtgatctaaatcacttttaagccagagtgaataatggaacgattaaaacgcatgtccgtttttgccagagtggtcgaattaggttcattcaccgccgcggcccgccagctccagatgagcgtttcttccatcagccagacggtagccaaactggaagatgaactgcaggttaagctgctcaaccgcagtacgcgcagccttggcttaacagaagcgggaaaaatatattatcaaggctgtcggcgaatgctgttcgaagtccaggatgtccatgaacagctgtacgcgtttaacaatacgcccatcggtacgctgcgcatcggctgttcttcaactatggcacagaatgtcctggctcgcataaccgccgatatgctcaaagagcacccgggtctctcaatcaatctggtcacaggcattcccgcgccggacctgattgcggacggcctggatgtggttattcgcgtgggagcgctgcaggattccagcctcttttcccgccgcctgggctccatgccgatggtgctctgcgcggcaaaaagctaccttcagcacgccggatgtccggaaaaaccggcggatctcgccagccactcgtggctggaatacagcgtccggccggataacgaatttgaaatcatcgctccggaagggatttcaaccaagctgatccctcagggcagattcgtcaccaacgatccgatgacgctggtgcgctggctgacggcaggcgtcggcgtggcttacgttccgctgatgtgggcgatcgaagagatcaaccgcggcgaactggagatcctgctgccgagctaccagtccgatccgcgaccggtatacgcgctgtataccgagaaagataagctaccgctgaaggtacaggtatgcattaattacctgactgagtatttcgtcggggtggcgaagatttaccaggggatgcacggccgggggattgcccgctagcggcccgagcccgccacagagggtaagaacagattatcgggcccggcatcggaaataatctgcgttacgtcgcggagattgccgatacgcacctccccggaacgatcaaatttgcttttgtcgattaataatagcgactgcgccgcacgtttcagaagcagcgatttgtaggcggcattattggcgctcgaatcccagagtacgccatcgttatcgatcccctcgcaggaaaaaataaacagatcgatctccagcgatttgacctgagaaaacagcgccggattaacataatagccatactgacgcaggagctgccccccggcgctgatcagctggatccgctcacggcggcccagctctacgcagaccggatggctattggtaaacaccgtcagggtcatattcggtagctgacgcgccagaaaccagcaggttgagctggcatccagggcgatcgtcatcccttcatcaatccacgccagcgccgtacgcgcgatatcagatttatgggcataatggcttttcacgcggcgctgaaaaggcttctcgccgttgtgattgttacgctggagaacgcgcgcctgcccgtggctacgctgaatacgcccctgcttctgcagctcgctcaaatcgcgacgaatggtctcgatactgacctgcagcagatgggacaacgcttcggtggttaaggtgtgatgctggttgagtagttcgactatctgctgctgacgcgcggctttcatcgcgactccgcggaggtgatttgcgctttcgccgcgggcgaaagcgcattgagaagtatcaggcagtaccgccgacggtgagtttatccactttgagcgtaggctgaccgacgccaaccggtacgctctggccctctttgccgcaaacaccgacgccgctgtccagcttcagatcgttccccaccatcgaaatctgctgcatcgcttcgatacctgaaccgataagcgtcgcgcccttcaccgctttggtcactttacctttttcaatcaggtaggcttcagacgtggagaagacaaatttcccggaggtgatatccacctgaccgccgccgaagttcggcgcgtagatgccgtaatcgaccgattcgataatctcctgcggcgtagatttccccgccagcatgtaggtgttggtcatacgcggcataggcaggtgcgcgtaggattcgcgacgaccgttaccggttggcgccacgcccatcagcctggcgttgagcttgtcctgcatatagcctttgagaatgccgttttcgatcaaaacgttatactggcccggcgtgccttcatcatcaatggcaagggagccgcgacggtgagcaatggtgccatcatccactacggtgcacagctcagaggccaccagttcgcccatatggccgctgaataccgacgtcccgcgacggttaaagtcaccttccaggccgtgaccgacggcttcatgcagcaggacgccaggccagcccgcgcccagcacaaccggcagcatcccggcaggcgccgcgacggcggtcaggttgaccagcgccatacgcacggcttctctcgcccaaacatccgcgcgaacgtcgccatcctgcgagtccaggaaatagtcgtagccaaagcggccgccgccgccgctggcgccgcgctcgcgtttaccatcctcttccaccagcacgctgacggaaaggcgaaccagcgggcgaacgtccgccgccagcgtgccgtcggtggcggcgacaagaattaactcgtagacgccggtcaggctggcggaaacttcctgcacccgcttatcggccgcgcgggcggttttatccacccggcgcagaatatccagcttctcttcccggctcatactttgcagcggatcgatgctggtatagagggaacgatgttccaccccgccaagggtatgcactttaccatccccatggtcgcgtacaatggtgcgggccgcctgtgcgctctgttccagcgccagtcgactaatctggtcagcataggcaaagccggttttttccccgctcaccgcgcggacgccaacgccctggtcgatattgtacgaaccatctttaatgatgctgtcttcaagaacccaggactcgtgatagctcgactgaaaatagagatcgccgtaatccagacggcgctcggccagctggccaagaatggtaaacagatcctgatgattcaggccgtttgccgacagtaattgttcacttaccaggttcagactcatcgttttgctactcgtttgttgccgcctcaggggcggaaataaaaaaggctatctattgagagtgcggtaattacgcacaatcgtcaaatcattgctttttgtcgctccgcgcctggcgcagcacttcgttaatttgcggctgatcgataggaccggtgatgcgatagcgcaaaatagagaccttgttccacagcggccccagtaccttactggcagcaaagaccgcggcgccgataatcgggttaacggcaaaggccgcggcgacgcccacggtcgcagaaatctccggcgcgaccacggcctgcatatccagctgacgacgcacgagatccaccgaccccttcatggcgatatccgcttccagaccatcgaccagcgtatcgtcggtatgcagaacgccgtctttaatccacgccgtactgcgaatggaatcaaagtagaacccttcgctgaacgtatcgctaaagtcgaagcgcagcttgcgcaggagcgcgtcaacgctcaacaaacgcagaagctggccggcatgaccggtgctgaggtcggtaaattcgccttttccaagacggcttttgaggatcccattaagcgaggcaacgtcgggctgccacggcggcgcacgccagtgcaggtcataatcgatatcaaacgacgaaccttttaccggcgtggagacgccgaagaagttcacgaaatcgtcagttttattaccgtgcagcttacctttcaaagaggttcgtacgcccgccggcgcgctcacccatacgccatcggtcgtcagacggccaaaaccggtatcgaccagtccgttcgccagcgtcagggtatcgccgcgaatatcaaaatccccttcgatacggccatatttttgcccccacagccagcactcggcgcagcgaagctgaaggtccggccagccgtggaaatcaatgttggtatcggccagcggggcgctgcttttttctgtcccgcggcttttcgccgccgttgggttgtagtagagatagcgaatggccgccagccacggggcgttcttccgcatcgtcagggttgcgttgacttcacgcccctgggcttcaatcttcgttcccccggcatcgggccgggagacaaggctaacgttattccagctctggcccgccatcgttaacgccggcgttcgcagcgtgacctgctccgggaagacgagattactgctgacgtcattcgccgctccgccctggaacagcgccagccactgcgcgccatccatcggcggcatattcagctccacgcctggctgctcgggaagcggagaaacggctttactgtccgtggttaaaatagcgcggtccagggtcagcttatgacccagcagccagcggctattaatatggttcttcgcccccattgagccggccagattaaaactgcttaagccgccatcgaccttaatttttaccggcaacggctccccggcctgcttatctaacggcgcaggtaagtgactacttacactcttcaggtcagcgttgaggtcaaccttataggccgcgctaccgcgatacggaagctcaatcgcgacttttccgtcccagggcacgctgccgctcagggtgccgtccagggatttcggcaataaaccggtacgcgcaggctgccagctggcgttcatcccgacgttcacgagaaatgctttcgcgccttcggtggtcgagaaatcaagattcagcggctgattaaaccagctcgcgctcatcggttcgcttttcaggtcgccgtttacaaagctgaatttaccgctcaggttgtgcaatgtggtatcgataggcttgataaacaagctgttattgttcaaccggacatcacctttagcggtggtcatctcgccatccagggggatatcaagatgtaagcgagcgctaacattaccgtccagctggagctcatccagcgccgcgcccagggtctctttcagcggcgtctcgttaaaataagggccaacctctttacccgggccgttaacgtcggcatcaatcagcagcttttctcgcgaatagtcgggaatcaccgcatcgagattgctggcggtcacgttgccgagcatcgccttatcggccttcatccatagcccatcattgataaagttaaggtcgatattaagcccggtaagcgcgggccagtcaggctgaaaggcaaaggtggcgttcttgagcggcaccgtgacctggaattgcccctcattatgcttgtacgggaaaagatgcgggttaccgccataagccagcgtcgcatcggtggcctgaccgcctttaatggctccgctgaggtaatccaccagcgctttgcccatcagattttccgggaagtagcgccaggcctgtccgccatcgttggtactgataccggccagaataccgagccagggttcgtcgccctgcggctgcagatagcggaacccaccgcgagcgcgaacgccggtagcctgtacgtcaatatcgcgaccatcgagcataaaacccttgtcattcttcacccaactgagggtcgcatcgcctttggcgatctccagcggcgcgcgaaagaccgtttcgtagggcattttcgcctgcgtcatgctggcatgcagagtaccgttttctacgctcccggcaatgttgccggagaaatgctcagcccctggcagcagcttccactgcttccaggacatgtcgctccagtccgcccggaagcgcgttttttccgccatttgcagcggaatatccagcgccagaagattgattttgccgtccggctgcgtcgtacgccagatttcgcccagcgacggagccagtttatccgccatcggctgcaacccggtcagaccgctaaggttaaggttgctggcgcgaatgcgcagctcatcgctgcgttgaccattttttccgtccacatcctgagccgggatccacgccatcgacagcgcgccgcgcggccagggtttgtcatccatcgagatgcgcgtatcagggatgtgaaagccccaactttgattatcgcgatagatgtgcgccgtcagattatcaaccgacagatggtgcttctctttatcgccctgccagctggcgccgccttttttcaaccatacatcgccgctggcgacatcgcccttgtcgatagtcatccagccttccaggctaaaccgcgcgctctgcagggcgatgttgtcctgcatccagcgcccaagccacggcttaacgtcgatatcatccgcctgaagccagacgcgccccttattgagcaggccgtcttcatcgcgcaggtccattcgcacctgcatcacgccgtgctggccggtcaggctgctgaggctaagctgcccctccgcgcgatggcgatttttaccgttcagccaggtaagctgcggaatggcgagctccgcacgctggccggagatggtcagaaagctcagatggctatcgcgaagaataaagtgatcgaactggcggaggaaaagatcgctgatacggtcggttttcagcccttcaccgctattattcgtttgaatgggggtattggtatgaacctgcagctgccagaaggtcagatcgcgaaactgccagcgcatatgcagcaggctttgccagacgtcgagcgccagggtgacgcgtttagcggaaagctcgccgccatcattcaggccggccttaacatcgcggacatcaagcgtcgggccaaaagtctgccagctggcgacaatatttgaagcatcgaccggtacgccggccatcgcggagactttttccagcacctgcggacgccagctgtttaactgcggcagaacgagacgcagaccgctcaccagcagtgcgacgacaacaatcaatgttgccacggtgagcagtaatatcccgggcagtcgcctcacgcatctctccttgtcagcctgttacgcgtcatccttttgcccgcctctttatcccgacatcagcaagcaaaacggatgattacatcattactacatcaaactgctcttgattatagagcggttcaatttgcactttgacctgcttaccgacaaagatctcgacttctgccagcgcgtgcgactcttcccctttcagcgtttccgctaccgcaggagaagcatagaccaggaaccggtcggaatcgtaggcatgatgcacgcgcacgatctcgcgcatgatttcatagcacaccgtttccaccgttttcaccgtaccgcgaccgtggcaggtagggcactcattacacagcacatgctccacgctttcgcgagtacgcttgcgggtcatctctaccagcccaagctgggagaagccgttgatgctggttttaacccggtctttgctcagcgcctgctcaagagagtgcagcacccgacggcggtgatcttcattattcatatcaatgaaatcgatgatgataatcccaccgagattgcgcagccgcagctggcgggcaatcgcctgggtcgcctcaatattggtattaaagatagtatcgtcaagattacggtgaccgacgaatgccccggtgttgatatcaacggtggtcatcgcttccgtttggtcaatgatcagataaccacctgatttcagctcaactttgcgttccagagcgcgctggatttcattttccacgtcaaagagatcgaaaatcggctgacggccgctgtagtgctccagcttgctggtcatctccggaatatattcggcggtaaactccagcagcgattcgtaagtcagacgagagtcaacgcgaatccggtcaagatgcgcatcggcgaaatcacgcagcacgcgctgcgccagcgccagttcgccgtacatttgatatcgggtctgctggcgctttttgcgttccatcactttcgtccagacgcgcttgagataggcggcatcagcagccatctcctgctcatgaacgccttccgccgcggtacggataatgaatccgccctgctcgtcacagtattcagagaccacttttttcaggcgttcacgttccgcttcgctttcaatacgctgagagacgccgacgtgcgaagcgccgggcataaaaaccagatagcgagagggaatagtgatatcggtggtcaggcgggcgcctttggtaccgagggggtctttcaccacctgcaccattaaatcctgcccctggcgcaccagctcggagatatcgcgtacggcgaactgtttttgctcttcgcccgccacgcactcggtgtgcggcataatatcggaagcgtgcagaaacgcggccttatccaggccaatatctacaaaagccgcctgcattcccggcagcacccgactgacacgacccttgtagatattgcctactattccgcgtcgcgcttcacgctcaatatgaatttcctgaagaataccgccatcaatgtaagcgacgcgcgtttctgatggcgttacgttaactaataattcagcagtcatctttatcccttttcttcacgcagtgagttaaagttacttagcaactcatacgtttccaccagcggtaagccaacgacggcgtgatagctgccatttatcttcctgacgaaacagccacccaacccctgaataccgtatgcacctgctttatctaaaggttcgccgctggcgacataatcggcgatatcctgccctgagagcacgcggaaagtgacctccgtgaccaccaggcaatccagcgtctgccgcttatcagccagcgccacggcggtcatcacctgatgagtctttccggaaagcatgcgtagcatctcggcggcgtgcccgccatcgcgcggtttttccagcacttcaccgttaaggatgacaatggtatccgcgcctaaaaccgggagatcgcgcggtgccagcgcgacgccagcctgggccttttcgcgcgccagccggaccacatactgctgggcgctctcctgcgggcggcgctgttcctcaataccgggaaccacgcgctcaaaagcgaggccaagctgtgtcagcagttcctgccgacgcggagaacctgaagcaagatacagaatcgtcatatcaaccttattgcaccgcaaactgctggcgcactttacgcatcagcaggaaaatccatggccagagcacaccgtttactacactactccagaacacttccggacggaaagagacgttgatcactaaaaactctgcccagaaaacaatgatatccacggagagggataacatgactaccaccagcgcctgttgccaaagcgccaggttacggaacagttgatactttagcgcaaccagataagccacaatacttaatgatagtgcgcgaacgccaagcgtcgacccgctgatgagatcgaggatcgcgcccatcacaaagcctgtgccaacgttaacccggtggggtagcgcgaggatccagtacaacaggataagcaatacccagtttggccggtagacgctaatgtccgccggccagggcataatctgcagcaatagtgcgataagaaacgagagccagataacccagcgtccctggctacggtaacttgccactattgccctcctgctggcagaggctgctgtggcataccggttgccggcgcgggcatctgcggccccatcgcatccggcgcaggcagaacctgcggcatcatctgcatcaggcgttcattcgctacgcgatgaacctcttccggcgtcatcggattcgcgccgttgcgatcggctccccacagcagcagcagataacgcaagcgctgcagaccggcagtcggacgcgcctgaatcaccgtatacgcacgctgcgtatccagcttaacggacgaaaccaccccgaccggatacccttcagggaagcggccgccgagacccgaagtgaccagcacgtcgccgacgcgaatatcggtattggccggcagatgttccagctgtaaatcgtcagtacaaccgttgcctgcggcaatgacgcgaatatcgttacgcagtacctgaatcggtaacgcatgcgtggcatcgcaaatcagcagcacgcggctggtcagcttcgcgaccgcgaccacctgacctacaacgcctttatcgctgataaccggctggccttcataaacgccgttaacgctgcctttatcgataaccacctgatcgctataggggtcgttaaccgttgagatgacctgggtcaccattttttgctcgtcctggcgcagcggagagcccagcagctcgcgcagacgcgcgttctcctgtttgtactgacccagcatcagtaagtcgctgttcttgagcagcaactcctgacgcagcgcgcgattttccagttcgagctgatcgcgggtggccagcgtttgcgaaacgctatccagcagttcccggggaccattagagacaaagtagaaagggctgacggctgtatccatgtacgttctaatttggctgaacgtacccaggcggctgtcggcgattatcacgccaagcgccaccaaaaccgccagaataaggcgaatctgtagcgacgggccacggctaaaaattggcttcataggctatgcgtattctcgtgtcagttaagatcggggcagccgtaggccagctacccggatctcaggctgactactcttcgctgaacaagtcgccgccgtgcatatcgatcatttccagtgccttaccgccgccacgagcgacgcaggtcagtggatcttctgcaactacgacagggattcctgtctcttccattaacagacggtcaaggttgcgtagcagagcaccgccgccggtcagaaccatcccgcgttcggagatatcggaagccagctccggtgggcactgttccagcgcgaccatcaccgcgctgacgataccggtcaacggttcctgcagcgcttcgaggatttcgttggagttcagagtaaagccgcgcggaacgccttcagcaaggttacgcccgcgaacttcgatttcgcggacttcatcacccggataagcggagccgatttcgtgcttaatgcgttctgcggtcgcttcgccgatcagggagccatagttacgacggacataattaatgacggcttcgtcaaaacggtcgccgccgatacggacagaagaggagtaaaccacgccgttaagggagatgaccgccacttcagtagtaccgccgccgatgtccacaaccattgaaccggttgcttcggagaccggcaggcctgcgccgatcgcagccgccatcggctcttcaatcaggaagacttcacgggcgccagcgccctgtgcggactcacgaatcgcgcgacgttcaacctgggtcgcaccaaccggcacgcagaccagcacgcgcgggctcggacgcataaagctattgctgtgcacctgtttaataaagtgctggagcattttttcggtaacgaagaagtcggcgataacgccgtctttcattgggcgaatagctgcaatgttgcccggtgtacgcccaagcatctgcttcgcttcatgacccacagcggcgacgcttttcggcgatccggcacgatcctgacgaatggccacaacggaaggctcattcaatacgatgccttgtccttttacataaatcagggtattcgcggtacccaggtcaatggacaggtcattggaaaacatgccacgaaatttttttaacatactaagggataatcctgaaagctggggcggaaaacaaaatccgcttactttaccaaccacgcgcagcagcgacaaggcgcaaaaatcatctgctgcggtgaaaattagtgcagttcgttacctttgttacaaatttgactgagtccgtccaacgcagaaatcttcagcagcgctccgcgcttgaatctgcaacctgtcaaaggtcattcactggcatttacattgcgacaatccggcaggtagacaagcacacccccatcactatggcgcgcattattctacgtgaaatcacgctaaacggcagatcaaacagagtatctttgcgaatattttttcacatttgtgtcaagtggctgtgaggcggcaaaaaattccccctgaccaccggtaacaccgcattgagacagcacctgccactcgcttcggctgagtaccccggttgcgaaaacctgaaccggcattcctttacaggcttctaccaggctctgcaccagcagctgattttcactgcgtttttctatattgcgcgataaccccgaatgcagcttaatcacttcaacatcgagctgcttgatccagctggttccaaccagcgtcaaaccggcctgaaccacggcaattcgaatacctaaagcgttaaccaaccgcataaccggctgcaggcggccgatatattgacaaacatccgcctctgcaagttcaaaaataatacgtcgacggtgcgatttttcgcattgcatcaaagtatcgcgcagccagcgctggaatcgagggcggatcaaggactcgaccgtcacctgcagcgcgaggttttcttccggccaaaagcctaaaaacggcagcaatcgcgtaatttgcaaacggtcatactcctccgccaggccaaactgcagcaccatcggcatatattcggccgcaatcacctcttccttaccatcataaagacggcacattagctcacgatgatgtacgcgaccatcacgagtgacggcgggtttctggtaaagtcgcgggccgccgcggctaagcatttgctcgataagcgtacgccagcgcacgttgccacgccctttctccggcagagaatcgtcatagacggcccagctgttgctgccctgcagcaccgcattacgcgtggccgcttccgcatgctccattacctgggccgccgtttgtccgctgcggaaagcgcagatcccgatatgcatcatatcgtcacgatcgagaattcgcgtcggcggcagggcatccatagctttcaggagtaacccggcaatgctgtccgcctctttcaacgtgcgatgcggaagcagaacggcaaaatcgctgcggtggtagcgagccagcagtgcgccagggtagcgcataataaaagtggaaagcatgttgatcagcgtaaagtagtgctcttcggtcgctgcgcgcccccagttatcgcgcagcaggtcgaaatccggcaggcggatcatcattacgatgccgtatgaccccactttctcctgatcttcaagcagcgtcgacagctgattatcaaaaaataatcggttactcagcccggtttttgaatcctgcgcgacataggaacggatcagggtatccatgcggcttcgctgatcgctggcgaactgaagttcggatagcagcatatccagcgcgctactggtattcgctggccactcgtgtaccgaccctcgcacctgcggtccgcgttcgccattaagaatacgcgcagtgcggagttccagtagctcctggcccgccagctggcgacggatccagcgcacggaaaaaaagataatcagcaccataaaaccaatggcgatggagagcggcgcggtgatgtgcagtgaacggaagtaattggccatcggatccaggtacaccagatggattgccataccgggctgcttgagcgacggtaccgtgatatcgcgaaactgattgctgctacctaaaggacgatagttatcggtgcgggaatggctatagaccgatttgccattaagctgaaagtcaacgcgcgccgcgtcgatcggcgtcatcagctcatccatctgcggttcaatctggtcaaaagacatagagaccagacggttatccagcatggtcgccaccgcctgaacgcggttggtcatttttagctgaatgccgttgtaaaaactcagcgaagcgccaatcagcgtgacaaagatcgtcaggctggtgagtaacgtgacaaacgctgagaatttcgtcgttaatcgcatccctgtgttaactccgcgtgtgaatgactacccgataaacatccgggctcctgtgctggcgcctaaactaaagtaagcactaactttctaaagagcgacgcatactatcaaagctggcgcatctggcaatttattgcgttacatcggtgtaataatgccgttagcgagtatagtctgcagaaaaaattttccaatcatccaacctatgaggaccggcgcatgcaggctttaatcttagaacagcaggatggcaaaactctctcttcggtgcaaaccattgacgccagccagctgccgcagggggatgtgacagtggatatccactggtccagccttaactataaagatgcgctggccatcactggtaaaggaaaaattatccgcaactttccgatgattcctggcatcgattttgccggttttgtccacagcagcgaggatccgcgtttccacgccggccagcaagtcctgctgaccggatggggcgtaggggaaaaccactggggcggactggcggagcgcgctcgcgttaaaggcgactggctggtggcgatgccgcaaggcctggatggtcgtaaagccatggtcattgggaccgccggtttcaccgcgatgctgtgcgtgatggcgctggaagacgccggggttcgtccggaagatggcgaagtcgtggtcaccggggccagcggcggcgtcggcagcaccgcggtcgctttgctgcatcatctcgggtacaaggtggcggcggtttccgggcgcgaaagcacccatgaatatcttaaaagcctcggcgcgcagcgcattcttagccgcgatgagttcgccgaaacccgcccgctggaaaaacagctgtgggccggtgccgttgataccgttggcgataaggtgctggcaaaagtgctggcgcagatgaactacggcggctgcgtggcggcctgcggtctggcaggcggctttgccctgcccacgaccgtgatgccgtttattctgcgtaacgtgcgcctgcagggcgttgattcggtaatgacgccagccgcgcgccgggccgaggcctggcagcgtctggtgcgcgatctgccggaatccttctacgcgcaaagcgcgacggaaatctccctcgccgaagcccctgaatttgccgataagatcatgaccaataagattcaggggcgcacgctggttaaaatcgcctaatctgcaatttttcgtgacatattcgcaataacgctccgcctccgtcatgctaagaaaaacgcacgacggaggatgccatgaaatccaaaaaactgacggaagccgacgtaacggcagaatccgtttttatgctgcagcgtcgccagatcctgaaaatgttgggaattagcgccaccgccctttccctctcaccctccgcgcaagctgacctgctggattggtttaaaggcaacgaccgcccgccggcgccggcaggtaaagcgctgacgttcgataaaccggcgcaatggcaaaacactctcacgctcacgccggaagataaggtatcaggctacaacaacttttatgagttcggcctggataaagccgatccggcggccaatgccggaagcctgcgcactgacccctggacgctgacgattggcggcgaagtggcaaaaccccttacgctcgatcatgacgacctgaccagccgatttccgctggaagagcgaatttaccggatgcgctgcgtcgaagcctggtcgatggtgattccctgggtcggcttcccgctgcataaattgttatcgctggtcgagcccaccagcaatgcgcgctacgtcgcgtttaaaacgctttatgcgcctgagcagatgccgggccaaaaagaccgttttatcggcggcgggctggcgtatccctatgtcgaagggctgcggctcgacgaggccatgcatcctctgacgctgctcagcgtaggcgtgtatggcaaagcgctgcctccgcaaaacggtgcgccggtccgactcaccgtgccctggaagtacggtttcaaagggattaagtctatcgtcagtatcgaactgacgcgtgaacgtccccccacgacctggaacctcgccggacctgaggagtatggcttctacgccaacgtcaatccgcatgtcgatcacccccgctggtcgcaggcaactgagcgctttatcggcgcaggcggcgtactcgacgtcaaacgccagccaacactgctctttaacggctatgctgacgaagtagcatcgctctaccggggcctgaatttgcgggagaattactagtgcgcctgactgtaaagcagattacctggctgaaagtgcttctccatctggccggatttttgccttttgtctggctcttctgggccggacatcaggggtatttcagcgccgacccggcaaaggatatccagcactttaccggtaggatggctcttaaattcctgctggctaccttgcttgtttcgccgctggcgcgctacgctaaacagccgttattgatacgcacccggcgcttacttggtttatggtgctttgcctgggctacgctgcatttgaccagctatacgctgctcgaacttgggattaacaatctggcgctattgggtacagaagtcctcacccgcccttatctgacgctggggttaatcagctggctgattctgctggcgctggcggcgacgtcaacgcaagcgatgcagcgaagattgggtcgtcgctggcaaacattgcataacttcgtctatgttgtcgcgatcctcgcccccattcactacctatggtcggtgaagattttatccccccaaccgctcatttatgcgctgctggcgatcctgcttttagcatggcgatataagaagttccgccagtggtggcgctaattccggatatgtgcagtttcccgcagttcttttatcaaccgccactctttacacgatagcggttgataatcttccctgataagaccagtatttagctgccaaatgctacgaaatcgttataatgtgcgactttggttttcctgacgggctttttgagtcccgaaaaggtgacaatcgcgcatcgaaggtatattttgttttttacccgagaatggcagaagatagccgcatattggccgataagtttcgctttttgctttcgagcatcggaggcttaacctgtcggcttctgaagaagcgcggcgtcttgcaacagcagtaattcatatgctttacagacggtgctaacacgcctgtcacaatcacactaaacaaagagtacggaacccactcatggatattcgtaagattaaaaaactgatcgagctggttgaagaatcaggcatctccgaactggaaatttctgaaggcgaagagtctgtacgcatcagccgtgccgcgccaaacgcaggtttcccggtgatgcaacaggcttacgccgcaccgatgatgcagcaacagccagcgctgtctaacgcagtcgcctctgcggcaacgccagcaatggaagcccctgcggcagcggaaatcagtggccacatcgtacgttccccaatggttggtactttctaccgcaccccgagcccggacgcgaaagccttcatcgaaatcggtcagaaagttaacgcgggcgataccctgtgcatcgttgaagccatgaaaatgatgaaccagatcgaagccgataaatccggcgtggtgaaagccattctggtcgaaagtggtcaaccggtagaatttgacgagccactggtcgtcatcgaataacgaggcgaacatgctggataaaattgttatcgccaaccgcggcgagattgcattgcgtatcctgcgtgcctgtaaagaactgggcatcaagaccgttgctgtgcactcaacggcggatcgcgatttaaaacacgtattgttagcggatgagacggtctgtattggcccggctccgtccgtaaaaagctacctcaatatcccggcgattatcagcgctgctgaaatcaccggcgcggtggctattcacccgggttacggatttttgtccgaaaacgcaaacttcgctgagcaggttgagcgttccggctttatctttatcggtccgaaagctgacacaatccgcctgatgggcgacaaagtgtctgcgatcaccgcgatgaagaaagcgggcgttccgaccgtaccgggctctgatggcccgctgggcgaagatatggacgttaaccgcgcccatgcaaaacgtattggctacccggtgattatcaaagcctccggcggcggcggcggtcgcggtatgcgcgttgtgcgcagcgatgctgagctggcgcaatccatctccatgaccaaagcggaagccaaagccgcgtttaacaacgacatggtgtatatggagaaatacctggagaatcctcgtcacatcgagatccaggtactggctgacggtcagggtaacgctatctatctggctgagcgcgactgctccatgcagcgtcgtcaccagaaagtggtcgaagaggcgccagcaccgggcattacgccggaactgcgtcgctatatcggcgagcgttgttccaaagcgtgcgtcgatatcggctatcgcggcgcgggtacttttgagttcctgttcgaaaacggcgagttctatttcatcgaaatgaatacccgtattcaggttgaacacccggtaaccgaaatgatcaccggcgtcgacctgattaaagagcagctgcgcatcgcagccggccagccgctgtccatcaagcaggaagaagttgtggttaaaggccatgcggtggaatgccgtatcaatgccgaagacccgaacaccttcctgccgagcccgggtaaaattacccgcttccacgcgccgggcggttttggcgtgcgctgggagtctcatatctacgcgggctacaccgtgcctccgtactatgactcaatgatcggtaagctgatctgctatggcgaaaaccgtgatgtcgcgattgcccgcatgaaaaatgcgctgcaggagctgattatcgatggcatcaaaaccaacgttgatctgcagattcgcatcatgaacgacgagcatttccagaatggtggcaccaatatccactatctggagaaaaaactcggattgcaggagaagtaattctgccatcgctgcaaaaggccggataatccggccttttttctttttctctcctctcctcttttccatgcggtacaatccccgctttctttatcctcaagggacaaaaaatggacaaacgctttgttcaggcccataaagaggcgcgctgggcgctgtggctaacccttctctatcttgcggcctggctggctgccgcctatctgccgggcgtcggtattggcctaaccggcctgccgcactggttcgaaatggcctgcctgctggtaccgctggtgtttattctgctgtgctgggcgatggtaaaagttatctatcgcgatattcctctggaggatgacgatgcagcttgaagtcatactgccgcttatcgcctacctgctggtggtgtttgctctctccatctatgcaatgcgtaagcgcacaacgggttccttcctgaacgaatatttcctcggcagccgctcgatgggcggcattgtattagccatgacgcttaccgctacctatatcagcgccagttcgtttataggcggccccggcgcggcctataaatatggcctcggctgggtgctgctggcgatgatccaactgccggcgatctggctttctctggggattttgggtaagaaattcgccattctggcgcgccgctataatgccgtaaccctgaacgatatgctctttgcccgctaccaaagccgtctgctggtctggctcgcgagcctgagccttctggtggcgtttgtcggggcaatgacggtgcagttcatcggcggggcgcggttgctggaaaccgcggcgggtattccctacgaaaccggtctgctgatttttggcgtgagtatcgcgctctataccgcgttcggcggttttcgtgccagcgtcctcaacgacacgctccagggaatggtgatgctggtcggcactatcgtcctgctggttggcgtcgttcatgcggcgggcgggctacataatgcggtagaaaccctgcaaaccatcgatcctaagctggtttccccgcagggggctgatgacattctttcccccacctttatgacctccttctgggtgctggtctgcttcggggtaattggcctcccgcacaccgccgttcgctgcatctcctataaagacagcaaagcggtgcaccggggaattatcattggcaccatcgtggtggcgatcctgatgtttgggatgcatcttgcgggtgcgttaggccgggcggtgatcccggatctgacggtgccggatctggtcatcccgacgctcatggtgaaagtattgccgccctttgccgccgggatcttcctcgccgcgccgatggccgccattatgtcgacgatcaacgcccagctgctgcaaagttccgctacgatcattaaagatctgtatctgaatctgcgccccgcgcagataacaaatgaagcccggttgaagcggatgtcggcaacgatcaccttgctgctgggcgctttactgctgctggcagcctggcgtccgcctgagatgattatctggctcaacctgctggcgttcggcggcctggaggccgtgttcttatggccgctggtgctgggcctgtactgggaacgcgcgaacgcgaaaggggcgttgagcgcgatgatcgtcggcggcgtactctatgccatactcgccacttttaatctgcagtacctgggcttccatccgatagtgcccgcgttgctgttaagcttattggctttcctggtcggaaaccggttcggtacctccgccccgcaagccgccgtattgactactgataaataaagagttttgccatgccatggatccaactgaaactgaacactaccggcgcgaacgcggaagaactgagcgatgcgttaatggaagcgggttccgtttccattactttccaggatacgcacgacacgccggtattcgaacctctgccgggcgaaacccgtctgtggggcgatactgacgttatcggcctgtttgacgccgagaccgatatgaaagaagtgattgcgatgctggagcagaatccgctgctgggcgccggtttcgtgcataaaatcgaacaactggaagacaaggactgggagcgcgaatggatggataacttccaccctatgtgcttcggtaaacgcctgtggatctgcccgagctggcgcgatgtgccggatgaaaacgccgttaacgtgatgctcgacccgggcctggcgtttggtaccggtacgcatcccaccacggcgatgtgcctgcagtggctggatggcctcgatctcgcgggcaaaacgattatcgattttggctgtggctcaggcattctggccattgcggcattaaagctgggcgccgcgaaagctatcggtattgatatcgacccgcaggccattcaggccagccgcgataatgccgagcgtaacggggtttctgaacgcctggaactctatctgcctaaagatcagccagaggcgatgaaagccgatgtggtggtcgcaaacattctggccggcccattacgcgaactggctccgcttatcagcgtgctgccggttacaggcggtctgctggggctttccggcatccttgccagccaggcggaaagcgtttgtgaagcgtacgccgatctctttaacctcgatcccgtcgtggagaaagaggagtggtgccggatcaccggttataaaaagtaatctccctgtggcctcatcgcaggccaccgcttttcgcgctttctgcacaaaatcattcgctcaatgagaataagatgatgcggtaacgtattgtagttaccaataaaatcataaatttattcattggacgaatgatatgaaaacaactttaggcaaggcggcattactggcgttaagcatgatgcccgtgacggttttcgcttcccactggagctatgaaggcgaaggttcgccggaacactggggggcgctcaatgaggagtacaaaacctgtcaaaatggtatgaatcaatcccctatcaacatcgataccacgtttaagacacacctttcaccgctggatacgcactacatcgatggccccattacgctcatcaacaatggtcacactatccaggcggggttaaagaccacaacagcggataccgttacgattgacggtacgccatttacccttcagcagttccattttcatgccccgagcgaaaacaccgttcacggtaagcactatgcgatggagatgcatctggtacataaaagcgctcaaggcgccgttgccgtcgtggcggtgatgttcgaccagggcgcggaaaatagcgaactgaacaaactatgggccaccatgcccgagaaagccgatcagacggctaaaatcgtcacccaaatggatctcaacgcccttcttcccgcagacaagacatactggcgtttcagcggctccctgaccacgccgccttgctccgagggggtaacctggattgtgcttaaacatcccctgacactttcatcagcgcagctggcaaaatttagccacgctatgcatcacgataacaatcgtccggtacagccgctgaatggtcgcgtggtcatagaataaacatcagctgtgcttcacgatcatgttctgaaatgagagccaactcacataaagccaaggtaatttgctgatttcttcagcagattatcttgcccgttccctgcgtcgggaagaaaaaatgagaagttagacaaaattatatgtgtagataaattcatcacatgtttttaatgcaatgatttatatagctaattattcatgcacactgacctgcaaggcgattctttgatccaccgcagaggattgctcaaagtttggcctttcatctcgtgcaaaaaatgcgtaatatacgccgccttgcagtcacagtatggtcatttcttaactcatgcgcatcggacactaccagctcaggaatcgactcatcgcagcgcctatggctggcattactgacagaccattccgcacgttgtgttacgagatgggagcaggattgaccgtatccgagatgatgtcctccaacccgcaggtttgggagagcgacaagtcacgcttacggatggtgcacgttgatgagcccggtattcgtaccgtgcaaatcgccggtagcgtaccggaagagatggctgcagccgcccgtattaacgtggaaagcggcgcccaaattattgatatcaatatggggtgcccggctaaaaaagtgaatcgaaagcttgcaggttcagccctcttgcagtaccccgagcaggtgaagtctatcctgacggcggtcgtcaaagcagtggacgttcccgtaactctcaagattcgcaccggttgggaaccggaacaccgtaactgtgtagaaattgcccaactggctgaagaatgtggcattcaggctctgactattcacggacgcacgcgcgcctgtttgtttaacggagatgctgagtacgacagtattcgggcagttaagcagaaagtttccattccggttatcgcgaatggtgacattactgacccgcttaaagccagagctgtgctcgactatacgggggcagatgcccttatgataggccgtgcagctcagggaagaccctggatctttcgggaaatccagcactatctggacactggagagctgctgccgccgctgccgttggcagaggttaagcgcttgctttgtgcacacgttcgggaactgcatggcttttatggccaggcaaaagggtaccgaatcgcacgcaaacacgtatcctggtatctgcaggaacacgctccagatgaccagtttcggcgcacattcaacgccatagaagattccagcgaacagctggaggcgttggaggcatacttcgaaaattttgcgtaatagaaataaagagctgacagaactatgttcgaacaacgcgtaaattctgacgtactgaccgtttctaccgttaactctcaggatcaggtgactcaaaagcccctgcgtgactcggttaaacaggcactgaagaactattttgctcaactgaacggtcaggatgttaatgacctgtatgagctggtactggctgaagtagaacagcccctgttggacatggtgatgcaatacacccgcggtaaccagacccgtgctgccctgatgatgggcatcaaccgtggtactctgcgtaaaaaattgaaaaaatacggcatgaactgatactaatcagttaaatgtttgatataaaaggcgctcttcggcatggggaagcgccttttttattacatgaattttaatggctggctatcgtctgccgcccgttagccccgcaaaggatcgacataatattatcaaccagggcgggtgcctggcggtacagatcgaattgcccgggctccaccagccagtttttaataataccggtaaatgcgctgtgtaatacaattaatgaaatttcaacattggtttccgctggcaataatccgttacgaatacagagctgcaaaatgctgcgaataatcggatagctaaaaccaattctcttgcgaatctcagcttccggcatcatgtcgctggaaaactcacacttctgatacagaatttgcattaaggcacgttgacggggattattagcgatatattgtaagccaataataaatttctctcgtagcgtgctgagcggatcctgatcgtctttaaggttaaattcatgctgaagcaggtcgcgtagcggcagctgctgttgccacatttcattaaatagctcagctttgcttgcaaagtgccagtacaccgctccgcgcgtcacgccagcagcatcagcgatatcggctaaggtcgtgctggtcacgccacgtaaggcaaactgctgaatggcagactcaatcagaagctgccgcgtctttaacgcatcttctttcgttcttctgggcatacggtgctccactcaacgccagattgagagtgtggggaaatcgctggatacctataaacctaacatctgacaatcaatattgtttagcaaaaatacagatgagttaaatctcaaacgctccccaataaatacaccacaagaataattaagataaatacattcatatattaaatatcaatgtaagcaaattttaatttaagttcattctaaaaacattattcctgatattttgtttttacgtgccttgctgatggctaaaaaataactatgtcttacatccatcgttttttatttgtaggataacaaaccgcattttaattcattatttcttgcacagattcgtggccatgcctggctcataatctataaggaacagcaatgacacctcatgtcagggttacacttttatccagccttatcatcccggccatcctgctcagcggttgcgataattcaggcgatcggcaaccgcatgcgcagatacctcaggtctccgtttatgtcgtacacagcgcgccgctgtccgtcaccacggagctacctggccgcacatctgcctaccgcgtcgcggaagtccgcccgcaggtcagcgggattatcctgcaacgtaactttgtcgaaggtagcgatgtcaccgctggacagtctctttatcaaatcgatccggcgacttatcaggcggcttacaacagcacaaaaggtgatgaagcgaaagcagaagccgcggcggctatcgcccacttaacggtcaaacgctacgcgcctcttctcggcacaaaatatatcagccagcaagaatacgatcaggcggtggcgaccgcgcgccaggccgatgccgacgttatcgccgcaaaagcagccgtggaaagcgcgcgtattaacctggcgtacacaaaagtgacgtcgccaatcagcggccgcatcggcaaatccagcgtgaccgaaggtgccctggtgacaaatggtcaggctgacgcaatggcgacggtacagcagctcgatcccatttatgtggatgtcaccgaatccagtaatgatttcatgcgcctgaaacaggaaagcctgcagcacggcagtgacaccaaaagcgtgcagttgattatggaaaacggaaaaccttatgcgcttcagggcacgctgcagttctctgacgtcacggtagatgagagcaccggctcaattacgcttcgcgccatcttccccaacccacagcacgctctgctgccagggatgtttgttcgcgcccgcattgatgagggcgtttcaccgaatgccattctcgttcctcagcagggagtcacccggacgccgcgcggcgatgccagcgtgatgctcgttaatgataaaaacctggtggaaacgcgagccgtcaccgcctcacaggcgattggcgataagtggttaatcacgagcggtctgaaagccggtgaaaaggttatcgtcagcggtctgcagaaagtacgtcccggcgtcaccgtgaaggccgaagaggataccgcgacgtccgtcgcgcaataaggtacaaatccctatgtctaagttttttatccatcgaccggtcttcgcctgggtgctggcgatcatcatgatgattgccggtggcctcgcaattatgcagctaccgattgcacaatacccgactatcgcgccgccagcggtggccatctccgcaacctatccaggtgcggacgcacaaaccgttcaggatacggtgactcaggttatcgaacagaacatgaacggtatcgataatctgatgtacatgtcctcaaccagcgattccgcaggcggcgttaccatcaccctgacctttaaatcaggtacggatccggatattgcgcaagttcaggtgcagaataaactgcagctggcgacgccgcttcttcctcaggaagtacagcagcaggggattagcgtcgagaaatcaagcagtagtttcctgatggttgctggattcatctccgataacacaagcactactcaggatgatatatccgactacgttgcatcgaacgtcaaagataccatcagccgccttaacggcgtcggcgatgtacagctcttcggcgcgcagtatgccatgcgcgtctggctggatggtaatctcctgaataagtacaacctcacgcctgtcgacgtcattaaccaactgcaggtacagaacgatcagattgcagcaggccagcttggcggtacgccggcccttaaaggccagcagctaaatgcatccattattgctcagacgcgactgaaggatccggcagagtttggcaaagtgactctgcgcgtgaacgcggatggctcagtggtgcacctgaaagatgtggcccgtattgagctgggaggtgaaaactacaacgttgtcgcaaaaatcaatggaaaaccggcttcaggactgggaattaagctcgctaccggcgccaatgccctcgataccgccgccgcgattaaagcgaagcttgccgaactgcagccgtacttcccgcaggggatgaaggtcgtctatccctacgacactacgccgtttgtgaaaatctctattcatgaggttgtgaagacgctgtttgaagcgattatcctcgtcttcctggtgatgtatctgttcttacagaatatccgggccacgctgatccccaccattgcggttccggtcgtcctgctcgggacctttgccgtactggcaatgttcggttactccatcaatacgctaacgatgtttggtatggtgctggcaataggccttctggtcgacgatgctatcgtggtggtggaaaacgtcgaacgcgtcatggtagaagagaagcttccccccaaagaagcgacggaaaaatcaatgtcgcaaattcagggggcgctggtcggcattgccatggtgctatcggcagtgtttgtcccgatggccttctttggcggctctacgggggcgatctatcggcaattttctatcaccatcgtctccgccatggcgctgtccgtactggtcgcgctgatcctgacccccgcgctttgtgccacattactgaaacccgcatcagccgatcatcatgagaaaaaaggattttttggctggtttaatgcgaaattcgatcgtagcgtgaaccactacactaacagcgtcagcgggattctgcgctgtaccggacgctacctgatcatctatttgctgatcgttgtgggtatggccgtcctgtttatgcgcctgcccacctccttcttgccggatgaggatcagggggtatttatgaccatgatccagcttccttcaggcgcaacgcaggaacgcacgcaaaaggttcttgatacggttaccgattactatctgcataaagagaaggcgaatgttgaaagcgtctttaccgttaacggctttagctttagcggtcagggtcaaaactccggtatggcgtttgtcagcctgaagccatgggaagaacgcagtggcgcagagaatggcgttgaggcaatcatcaaacgtgcgaccgttgccttcagtcagattaaagatgctatggtctttcctttcaatctgccggcaattatcgagctgggtacggcgaccggttttgactttgagcttatcgatcagggtaaccttggccatagcgcgttaaccctggcccgtaatcaacttctgggtatggtgagagagcatcctgaccagctggtacgcgttcgccccaacgggctcgaagacacgccgcaattcaagctggatgttgatcaggagaaagctcaggctctgggtatttcgctatccgatatcaatgaaaccatttccgcggcgctagggggttactacgtcaacgactttattgaccatggacgagtgaaaaaagtctacgttcaggccgatgcaaaattccgtatgctgccgagcgatatcaataatatgtacgtccgcagcgcgaatggcgaaatggttccgttctccgcctttgtcacctcacgctgggtttatggttcaccgcgcctggagcgctataatggcttaccctctatggaagttttgggtgaagctgctccggggaaaagtaccggcgatgcgatgattttaatggagcagttagccagcaagcttcctgccggtattggttacgactggacaggaatgtcctatcaagaacgtttatccggtaaccaggcgcccgcgctctatgccatttcgcttattgttgtctttctgtgtcttgcggcgctttatgaaagttggtctattcccttctccgtcatgctcgtcgttccattaggggtagttggtgcattactggcagcatcgttacgcgggcttaataatgacgtttatttccaggtgggcttattaacaactatcggcctctctgcgaaaaacgcgattcttatcgtggagtttgcgaaagacctgatggataaagaaggcaaaggaattatcgaagccacacttgaagcatcgcgtatgcgtttacgccctatcctgatgacttcgctggcctttatcctcggggttctgcctctggttattagccatggagccggcagcggcgcccaaaacgcggtcggtaccggcgttatgggaggaatgctgacggcaacattactggcgatcttctttgttcctgtcttcttcgtcgtggtaagacgccgctttacgaaacacgcagagtaaatatgtttttctaaaggcacctttcaggtgcctttttttcgtctgcgtttcgataactatcctgatgatattaaatatatttatttctgcggtacccaatacacattatttccccatagttctctggttttcttcatgatatttacgttactcataaattgagattatttactctagcggcaccccatattgctgatgataaaataaaccgttccgcgcaggtatgggttctccaatacagcgaagcggattatttagaggtaatatcatgaataaagttattatagtggcattgctggcaacgctactcgccggctgtgcacatgactctccgtgtgtaccggtctatgattctgaaggcagattagtgcacaccaatacctgtatgaaaggaacgacccaggataactgggaaaccgccggcgcgattgccgggggcgcagctgccgtcgctggcctgacgctcggcatcgtggcgttgactcgttaattcctttcttttctctgccatgacaggtgccggagcgagctccggcactgcttttccccgaaggtaagctccacaatgcttaaactgcaataccggcagctgaagctcgggaaacgatcctttagataagatcaaatgggcaaattgtcattgccaggtctggtataaatggatattttctcagccgcataaacgcaaaaagcccatccgtcaggatgggcttttcacttatttgatgcctggcaatgccctactctcacatggggagaccccacactaccatcggcgctacggcgtttcacttctgagttcggcatggggtcaggtgggaccaccgcgctatcgttgccaggcaaattcttttcaaatcgccgaactttaacctaaaaactggtgctgatacccagagtcgaactggggacctcacccttaccaagggtgcgctctaccaactgagccatatcagcacacttaatttgatgcctggcagttccctactctcacatggggagaccccacactaccatcggcgctacggcgtttcacttctgagttcggcatggggtcaggtgggaccaccgcgctgtcgccgccaggcaaattctgttgtcagaaacgaatcttttatctttcgttcctgaaatctgtaatctaagctgaaaatctctcaatccgccaaaacatcttcggcgttgtaaggttaagcctcacggttcattagtaccggttagctcaacgcatcgctgcgcttacacacccggcctatcaacgtcgtcgtcttcaacgttccttcaggacccttaaagggtcagggagaactcatctcggggcaagtttcgtgcttagatgctttcagcacttatctcttccgcatttagctaccgggcaatgccattggcatgacaacccgaacaccagtgatgcgtccactccggtcctctcgtactaggagcagcccccctcaattctccagcgcccacggcagatagggaccgaactgtctcacgacgttctaaacccagctcgcgtaccactttaaatggcgaacagccatacccttgggacctacttcagccccaggatgtgatgagccgacatcgaggtgccaaacaccgccgtcgatatgaactcttgggcggtatcagcctgttatccccggagtaccttttatccgttgagcgatggcccttccattcagaaccaccggatcactatgacctgctttcgcacctgctcgcgccgtcacgctcgcagtcaagccagcttatgccattgcactaacctcctgatgtccgaccaggattagctgaccttcgtgctcctccgttactctttaggaggagaccgccccagtcaaactacccaccagacactgtccgcaacccggattacgggcccacgttagaacaccagccattaaagggtggtatttcaaggatggctccatgcagactggcgtccacacttcaaagcctcccacctatcctacacatcaaggaccagtgttcagtgtcaagctatagtaaaggttcacggggtctttccgtcttgccgcgggtacactgcatcttcacagcgagttcaatttcactgagtctcgggtggagacagcctggccatcattacgccattcgtgcaggtcggaacttacccgacaaggaatttcgctaccttaggaccgttatagttacggccgccgtttaccggggcttcgatcaagagcttctccttacggatgaccccatcaattaaccttccggcaccgggcaggcgtcacaccgtatacgtccactttcgtgtttgcacagtgctgtgtttttaataaacagttgcagccagctggtatcttcgactgatttcagctccatgagcaagtcacttcacctaccatcagcgtgccttctcccgaagttacggcaccattttgcctagttccttcacccgagttctctcaagcgccttggtattctctacctgaccacctgtgtcggtttggggtacgatttgatgttacctgatgcttagaggcttttcctggaagcagggcatttgtcacttcagcaccgtagtgcctcgtcatcacacctcagcgttaataacgttccggatttacctggaacatccgcctacatgcttaaaccgggacaaccgtcgcccggccaacatagccttctccgtccccccttcgcagtaacaccgagtacaggaatattaacctgtttcccatcgactacgcctttcggcctcgccttaggggtcgactcaccctgccccgattaacgttggacaggaacccttggtcttccggcgtgcgggtttttcacccgcattatcgttacttatgtcagcattcgcacttctgatacctccagcaaccctcacaggccaccttcaacggcttacagaacgctcccctacccaacaacacatagtgtcgctgccgcagcttcggtgcatggtttagccccgttacatcttccgcgcaggccgactcgaccagtgagctattacgctttctttaaatgatggctgcttctaagccaacatcctggctgtctgggccttcccacatcgtttcccacttaaccatgactttgggaccttagctggcggtctgggttgtttccctcttcacgacggacgttagcacccgccgtgtgtctcccgtgataacattcttcggtattcgtagtttgcatcgggttggtaagtcgggatgaccccctagccgaaacagtgctctacccccgaagatgaattcacgaggcgctacctaaatagctttcggggagaaccagctatctcccggtttgattggcctttcacccccagccacaagtcatccgctaatttttcaacattagtcggttcggtcctccagttagtgttacccaaccttcaacctgcccatggctagatcaccgggtttcgggtctataccctgcaacttaacgcccagttaagactcggtttccctgcggctcccctatacggttaaccttgctacagaatataagtcgctgacccattatacaaaaggtacgcagtcacccaaccagtgggctcctactgcttgtacgtacacggtttcaggttctttttcactcccctcgccggggttcttttcgcctttccctcacggtactggttcactatcggtcagtcaggagtatttagccttggaggatggtccccccatattcagacaggataccacgtgtcccgccctactcttcgagttcacagcctgtgcgttttagtgtacgggagtatcaccctgtaccctgcgactttccagacgcttccactaacacacaagctgattcagactccgggctgctccccgttcgctcgccgctactgggggaatctcggttgatttcttttcctcggggtacttagatgtttcagttcccccggttcgcctcgttaacctatgtattcagttaacgatagtgcaacgaattgcactgggtttccccattcggacatcgccggctgtaacggttcatatcaccttaccgacgcttttcgcagattagcacgtccttcatcgcctctgactgccagggcatccaccgtgtacgcttagtcgcttaacctcacaacccgaagatgtttcgtaaaacatcgtcgtgtcgcgaaaatttgagagactcgaacacacttaaacagtgtgtcgtttcaattttcagcttgatccagatttttaaagagcaaatatctcaaacgtcacccgaagatgagttttgagatattaaggcaggtgactttcactcacgaaccagcaagtggcgtcccctaggggattcgaacccctgttaccgccgtgaaagggcggtgtcctgggcctctagacgaaggggacactaaagtctcaatcgcaagacgccttgctatttacttttcatcagacaatctgtgtgagcactacaaaggcaggttctttaaggtaaggaggtgatccaaccgcaggttcccctacggttaccttgttacgacttcaccccagtcatgaatcacaaagtggtaagcgccctcccgaaggttaagctacctacttcttttgcaacccactcccatggtgtgacgggcggtgtgtacaaggcccgggaacgtattcaccgtggcattctgatccacgattactagcgattccgacttcatggagtcgagttgcagactccaatccggactacgacatactttatgaggtccgcttgctctcgcgaggtcgcttctctttgtatatgccattgtagcacgtgtgtagccctactcgtaagggccatgatgacttgacgtcatccccaccttcctccagtttatcactggcagtctcctttgagttcccggccgaaccgctggcaacaaaggataagggttgcgctcgttgcgggacttaacccaacatttcacaacacgagctgacgacagccatgcagcacctgtctcacggttcccgaaggcaccaaagcatctctgctaagttccgtggatgtcaagagtaggtaaggttcttcgcgttgcatcgaattaaaccacatgctccaccgcttgtgcgggcccccgtcaattcatttgagttttaaccttgcggccgtactccccaggcggtcgacttaacgcgttagctccggaagccactcctcaagggaacaacctccaagtcgacatcgtttacagcgtggactaccagggtatctaatcctgtttgctccccacgctttcgcacctgagcgtcagtctttgtccagggggccgccttcgccaccggtattcctccagatctctacgcatttcaccgctacacctggaattctacccccctctacaagactccagcctgccagtttcgaatgcagttcccaggttgagcccggggatttcacatccgacttgacagaccgcctgcgtgcgctttacgcccagtaattccgattaacgcttgcaccctccgtattaccgcggctgctggcacggagttagccggtgcttcttctgcgggtaacgtcaattgctgaggttattaacctcaacaccttcctccccgctgaaagtactttacaacccgaaggccttcttcatacacgcggcatggctgcatcaggcttgcgcccattgtgcaatattccccactgctgcctcccgtaggagtctggaccgtgtctcagttccagtgtggctggtcatcctctcagaccagctagggatcgtcgcctaggtgagccgttaccccacctactagctaatcccatctgggcacatctgatggcaagaggcccgaaggtccccctctttggtcttgcgacgttatgcggtattagctaccgtttccagtagttatccccctccatcaggcagtttcccagacattactcacccgtccgccactcgtcacccgagagcaagctctctgtgctaccgttcgacttgcatgtgttaggcctgccgccagcgttcaatctgagccatgatcaaactcttcaatttaagtttgatgctcgtgaattaaacttcgtaatgaattacgtgttcactctttgagacttggtattcatttttcgtcttgcgacgttaagaatccatgtcactttgagtgcccacacagattgtctgataaattgttaaagagcagtgcaacgcggctttcgctcaccgttgcgaggtggcgtatattacgctttcctctttcagagtcaacccgttatttcaggattttttctcttcaaccgaccgggttgtttgtgaagtgattcacatctgccgtgtcagtgggagcgcattatagggatcccatttttttgcacaagccttttttcgatctttttttccaaatgatggtttttcagccgcttcgcggcgttcttgctcaatccgctcaatttttaccacaataaggggttgcagacggccagaaaagcaaccaaagtctctgcactcccttcttttattgaggtaaccatgaccaccagcttgcgtcgttataaagatttattccctaaaacgggcctacgcgtgatgatcgacagcagcagcgtggtgatcggcgatgtcagaatagctgacgatgtcagtatctggcctctggtcgccattcgcggtgatgtgaactatgtggaaataggcgcccgcactaacattcaggacggtagcgtcttacatgtcacgcataagtcttcatctaatccacagggcaatccacttatcattggcgaggatgttaccgtcggccataaggtgatgctacacggctgcactattggtaaccgggtcctggtcggtatgggttcgattttgttggatggcgtgattgttgaagacgatataatgattggggctggcagtctggtgcctcagaacaaacgtctcaagagtggctatctttactttggtaacccggtaaaacagatacgccccctgacagaggcggaaattgccgggctacaatattcagcgaacaactatgtaaagtggaaaggtgattacctggctcaggaaaaccagatccaaccttgagcatcttcttgctggtcgagaatgagatcctgggcttcatcttccagatcccagcgatgttcacgaaaagcggccagccattgcgccggctcttcaccgccaaaacgcttcttgagcaccgtaagcgttaaggcgcaggtaagctgcatgccgttaactaatgcaggaaaagcgatacattgacgcgcttcatcccatacctctctgtctggaaactgaattgcctggttcatgcattcagttccttctgcaaagccgcaatgactggcgtaatttctggcagaacgccgtgccacaacagcaccgcatgagcagcctgcgccaccagcattcccaacccatcagcgcattttgtcgcaccgtgttgctggcataaggataaaaatggcgtactacctttctggtaaaacatgtcataacaacagacatggggatttattaaggtaacagggatcgcgggaacaccgccgtcaataccgctggatgtcgcattaataatgagatcaaattcctgaccgcctaatgcttctatatccaaagcgcggacgctgccggtatgagcaaaaagcgtagccagttcatgggcgcgagaataggtacgattaacaatagtcacggcacaatccagcgacaggagaggaagcaaaacgccgcgtgaagccccacctgcgccaataagcaatacccggaatcctggtttaataaaacccagccgttccagatcgctcagtagtccaataccatcggtattgtcccccagcaggcggccatcctccaaccgtttaagcgtattgaccgcaccggccagcgctgcgcgttcggttagctcatctgctcgcgcgaaggcctcttctttaaaaggcacggtgacgttcgctcccttaccgccttcattaaagaaggtatcgagcgtcgtaacgaaatcatcgagcggagccaggatacggccatagggatgcgtaatttgcaactgctgagcaaaaagccgatgaattgatggcgacttgctatgggcaatagggtgtccgaagacggcataagtttccatgagttacccctggcggaagagttcgcccgtcaaggcatcacgtatttcagatgggttttgacgccctcccgtagccccgtcaacgaccgggaaatcagcgccaaactgcgcataaacttctgccgtcgtgcggcaaggaggctggccagacaaatttgcgctggttgaaaccagcggttttccgtaagcattacacagttcgaccaccagcggatgatccgtgactcgcacagccagtgaattgaagcgccccgtcaaccaacgcggcgttgaagcgcaagcggggaagacaaatgtcacaggccctggccagcaagaaaaaatcgtctccagctgctcatcgctaagttgcgtatcgtcaatatagggtttgagttgctcgaagttcgccgcaatcaggatcagccccttttcaacgggacgctgtttaagtgcaagcaggctcatgacggccttttcgctatcgggatcgcaaccgacgccaaaaacggcttctgttggataggcgatgacatgttcattattcagaagcgccacagcacgtacgatggcttctgagggcaggttattattcacagatttattccgccggtatcggctttccacattgtttgctggcacagaagcgtttaacgccctgcgccgttttcttttcgattagcaacgggtaatgacactctggacactcgcccgccactggcctgaagtttatgacgaactggcaatcggggtaacgatcgcaggaatggaagttttttccaaaacgtgagcggcgctgaaccaaatgcccttgcccgcactgtgggcaggcaattgcggtttcatccggcttatcgataagttcagtatgttcgcaatctggatagctgctacaaccgataaacataccaaaacgcccctggcgtagtaccagcactgcgccgcaagacgggcacgtttgcccctccagaactttgacaatatgtccgtccgcctgatttttcaggggccggacatagtcacagtcaggataatgcgagcagccgagaaaaggcccgtgtttcccggagcgtattaccagttcagccccacactgcgggcagggttcgtttttacgcaccgagaacagcgctgttttggtcataacaattctaatgtcgcagcaaaaaagttagtgcagcataccttcatttacttcaaagagtaattcttccatttgctggtaggcattttcgcaaccgggaatattgaacagcaccatcaggatcacccatttgagatcttccagatcgaactctgccgtatccagcgccagtacacgctcaatcaccatttcccgtgtttcgaggttcaacacctgaatttgctcaaggaataataagaatccccggcagcttgcatcaagacgctggcactcgtcgtcggtgtagactcgtaacgagagtgggtcagaagcaagctgcattggcgcaacaagcccctcctggtaatcagccagtttctccagccacatcagggcgttatagatatcttctcgttcaaaaccggcatcggtcagatcccgagtcagcttgtcctgatccacgcgcatttctgcttcgttatggatgtaagtttcaaacagatacatcagtacgtcgaacatggcttgccctccttaatcggacatagccgccgggtacagctgcgatccagcctgctaactccagttctagtagctgggctacggttactggcacagattggccggcacgttcagcgacaacgtcaacaggtgttacctcatctcctacgttagccaggagctctggaaatggcaatgctacagaaggccgattaccgcaattatttgcgtcatctggttcaggaagaacatatggcagctcatcccgccagtattcgacgatgtcttccggggctgtcacgggaatcgcgccctgcttgataagccagtggggaccttctgaacccgggctgccaatcggccctggcagggcaaacacatcccttccctgctccagagcataacgaaccgtcactaatgagccgcttttcagggccgcctcaataaccaacacgccggcacttagcccgctgataatccggttacggcgaggaaagttgcccggcaggggcggggtaaacagcggaaactccgaaatgatggcgccgcagctgtttgtaatctgctccgctagcgcctgatgacggcgaggatagatctctcttaagccattccctaaaacagcaaccgttttacctttcccttccagcgcaccacgatgagcaattccatcaatgccaagggccaggccgctcgtgatcgtaataccataacgtgctaaagcttcgctaaagagtttcccccaacgagcgccataccatgaatgcgcccggctcccaatgacggacagctgccggctgctcagtagcgcagggtctccacatactaaaagagcgcaaggaaagtcgacaatcgcccgcagctggggtgggtaaagcggatcttcggcagtcagtagatagcaatttggtcgctccagccattgcagcgtggcatctatctcgcattggttaacgctgaggaaatgcttcgattgcgccagactcaagccacaggctcgcaaatcttctcgacctaacgtcgcagatgcacatagctgacgggcggcactgatagcactctcgccatacaggctgctcaccctcatcaaacgtaaccaaatttccctgggcgtcatccctatccccctgccacaagcgactttaacaatctttgcgattggacagcgagactgtcaattgcagggggttttgtctagaatagaggtaataatctttccaactcctgaacacaactctggataactatgtcagttttgcaagtgttacatattccggacgagcgccttcgcaaagtcgcaaagccggtagaagaagtaaatgcagaaattcagcgtatcgtcgatgatatgttcgagacgatgtatgctgaagaaggtatcggtctggccgcaacgcaggtggatattcaccagcgtattattgttattgatgtatcagaaaatcgtgaagagcagctggtattaattaaccctgagctgctggaaaaaagcggagaaacaggcattgaagagggctgcctctctattcctgaacagcgtgctttagtgccgcgtgcagaaaaagtgaaaatccgcgcgctcgatcgcgaaggcaaaccttttgagcttgaagccgacggtctgctggccatctgcattcagcacgagatggatcacctcgtcggtaagctgttcatcgattacctgtcaccgctcaagcaacaacgcattcgtcaaaaagttgagaaacttgatcgtctgaatgctcgagcttaaggacgagaataaacgtgtcagactcactacgtattatttttgccggcacccctgactttgcagcacgtcatctcgacgcgctgctgtcctctggacacaacgtggttggcgtcttcacccaaccggaccgtccggcaggtcgtggtaaaaaactcatgcccagcccggtgaaagttcttgctgaagaaaaaggcataccggtattccagccagcttcactacgtccgcaggaaaatcagcagctcgtctccgatctgcgtgcagacgtcatggtcgtcgtagcctatgggctccttctaccaaaagccgtgctggatatgccgcgcctgggctgcattaacgttcacggttcgttgcttccgcgctggcgcggcgcggcgcccattcagcgttcgctgtgggctggcgataccgagaccggtgtcaccatcatgcagatggatgtcggcctcgatacgggtgatatgctgtataaacttgcgtgcccaatcacggccgaagacaccagcggaacgctgtacgacaagctggctaaactggggccgcaggggctgatcgacacccttaagcagcttgctgcaggtaccgcgaaaccggttgtacaggatgaagcgctggttacccatgcgcaaaaactcagcaaagaagaagcgcgtatcgactggtctcttccagccgctcagttagaacgctgcattcgcgcctttaacccgtggccaatgagctggatagaaattgatggccagccggtaaaagtctggcaggcgtcggttatcgatgtggccacaacagccgaaccggggaccatcattgaagcgacaaaacaggggattcaggtggcgaccagcgacggcgtgctgaatttactctcgctacagcctgccgggaaaaaagcaatgagtgctcaggatctattaaactcgcggcgggaatggttcgctcctggcaaccgtctggtctgacgcgcccttcttaatacgcccggtgttgccgggcatttttattttgtgcttatgaaaaaacaactcaatttacgcagcctggcagcgcaggccgttgaacaggttctcgaacaagggcaatccctgagcaacgttctgcccccgctgcaacaaaaagtatccgataaagacaaagcgctgcttcaggaactctgctttggcgtgctacgtaccctttcccagttagattggctgatcggcaagctcatgtcccggccgatgacgggtaaacagcgtgttgtgcactacctcattatggtgggcatttaccaactgctgtacacacggattcctcctcatgctgcattggcggaaacggttgaaggcgcagtagcaattaagcgcccgcagctcaaagggttgattaacggcgtattgcgccagtttcagcgccagcaggaagaactgttatctgaattttctcgtagcgaaattcgctttttacatccgtcctggttgttgaaacgtctgcagaaagcctatccagcacagtgggaagcgatcgtggaagcgaacaaccagcgcccgccaatgtggttgcgcgtaaaccgtgtccaccatccgcgcgatagctggctggcactgctggaagaggcgggaatgaaaggttttactcatcctgcttaccctgacgctgtgcgcatggaaacaccggtgccggtccacgcattgccggggtttgaagagggttgggttacggttcaggatgcctccgctcagggctgcatcacatttcttgatccaaaaaacggcgagcaaattctggatctgtgcgcggcaccggggggtaaaaccacacatattctcgaagcggcgcccgaagcacaggtgctggccgtcgatgttgatgagcagcgactctcccgcgtctatgacaacctgaagcgtctgggcatgaaggccaccgttaaacaaggtgatggccgttatccagcccaatggtgtggagagcagcagttcgatcgtattctgctggacgccccctgttccgccaccggcgtcattcgccgtcatccggatatcaagtggctgcgccgggatcgtgatatcgcggaactggcccagctgcagtctgaaattctggatgccgtatggccgcatttgaaaaccggcgggactctggtttacgcaacgtgttcggtattgccggaagagaacagccagcaaattaaagccttcctgcagcgtactgcggatgcggttctcagcgaaaccggcagcgcagatttgccgggccagcaaaatttgccaggtgctgaagaaggtgacggcttcttttacgctaagctaatcaaaaagtaatgagataacgagtcgcgactgatgaaaattatcatattgggcgcagggcaggtcggcggaactctggcagaaaaccttgtcggagagaacaacgatattacgctggtagacacgaatggcgaccgccttcgcagtcttcaggacaaatttgatctcagagtggttcagggccacggctcgcatccacgcgtgctgcgtgaggcgggtgcggatgacgccgatatgctggtcgcagtgaccagctcagatgaaacgaatatggtggcctgccaggtcgcctattcgctgtttaatacgccaaaccgtattgctcgcatccgctccccggattatgtgcgtgatgccgataaacttttccactcagaagcggttcctattgaccacctcatcgcgccagagcagctggtcattgacagcattcaccgcctgattgagtatccaggcgcgctgcaggttgtcaattttgccgaaggaaaagtaagcctcgcagtcgttaaagcctattatggcggtcctttagtgggaaacgcactttcaactatgcgcgaacatatgccgcatattgacacacgcgtagccgctatcttccgccacgatcgccccatcaggccacaaggttcaaccattgttgaagccggtgatgaagtgtttttcatcgccgcttcgcagcatattcgcgccgtcatgagcgaacttcagcgcctcgaaaagccgtataagcgcatcatgctggttggcggcggaaacattggcgccgggctcgctcataagctggagaaagattacagcgtcaaactgattgaacgtaatcagcagcgtgccgcagagcttgcggaaaagctgcaaaatacgatcgtcttctacggcgatgcttcagatcaagaattgctggctgaggaacatatcgatcaagtcgatcttttcattgccgtcaccaacgatgacgaagccaatattatgtcagccatgctggcaaagcgcatgggggccaaaaaggtgatggtactgatccagcgccgtgcctacgtcgatcttgtccaggggagcgtgatcgacattgcaatatcaccgcagcaggcaaccatctctgcgttgctcagccatgtgcgtaaagccgatattgtcggcgtttcctccctacgccgcggtgtcgcagaggctattgaagctgtcgcgcacggagatgaaagtacttcacgggtggttggacgcgctatcgatgagattaagcttccccccggaacaattattggcgccgttgtacgcggtaatgatgtcatgatagcgaataacaatctgcgtattgagcaaggggatcatgtcgttatgttcttgactgacaaaaaattcatctcagacgtcgaaagactattccagccaagtcctttctttttgtagttcgcaggcgtcgacaagacgcctttcttttatcccttgtatatcaaaggataatatttttctgcaattatttcgtggtaatggaaaatagtaatacatttgttaaacttatcagtgtcagctggctcaaggagaataaaatgagttttttaaaagaatttcgcgaatttgcgatgcgcgggaatgtggttgatttggcagtcggtgtcatcattggcgcagcatttggtaaaatcgtatcgtcgttagttgccgatattattatgccgccgctaggcttactcattggcggaatcgactttaaacagtttgccgtgacgctacgggatgcccagggtgacatcccggcggtcgtcatgcattacggcgtattcattcagaacgtgttcgattttattatcgtggcgtttgctatttttatggcaatcaaactgatgaataaactgaacaggaaaaaggaagaggccccggcagcaccaccggcgccaaccaaagaagaagtcctgcttagcgaaattcgtgacctgcttaaagaacaaaacaatcgttcttaagaagccttaaaagcagaaggccagtggtaaaaaagtcatttactttcttgccactggcctcccgaccattctgtcctgcatgtttttcttttctttgatagctgcctttccctttcttgttcttttcaactcgctgcctgaataacgggtcatgaagtagtgcctcaagggcgttatcttttatttgccctttagtatgctgatagcggctcataagctctccagatatgtaaaagaaatcggcgtgagtgtagacgcgtctgatgaaaaaatcaacgtgctggattatgactgctggcgccctgctccagtgcttcaagaattgagcaatagacgctgctgtgcgctgtgccgcagcatgcatcattgaggcgctgcaaagaacgacgcatggcttgtaactctttaatccgggattccacttcacttaaacgagcctgcacaatgcctttagattcctgacaggtatgatgttccggatcgatgcggatcgagagaagttcgcggatcgattccagcgtaaaaccaagctgcctggcatagcgaataaaacgcagcctctgtagatcgttatccgaatagagacgaaagccaccttcagtgcgtacgttatgatccatcatctgctgtttttcataatagcggatggtatcgggagtaacgtcagctaatttagccagttcacctatgcggtacataattactcctcattaatcttttgcagcaacttatcagcgtaatccccacgcagaaagtcagtgttcaagcccgcctgccgcagctttaactcaagcagcgccagacgacggctcagctcagcatagcggggatcgctctcctgaacgcctttaagtaagtcattgagcatcacggcttctttacgatgttcaagttcgggaggtaaacaacccgaattcttgagtaatcgatagcctgcgcgtagctcaggcggcacatgcgagtcatcgtccagagtcagtggctccccacttcccggcaggttatcaaactcacctttgtgctgtgcatcaagaatatggcgttctgcccactgatccagtaaccacatcataaggctccggggatgaacaaaaataatgcagatattgtaaacaagcaggaatagggtggatataaaaaaacccgccggagcgggtttttttacgttactacagattactctgcagcagcttctgctttcgattcagagcgatcaaccagctcgatgtatgccatcggcgcgttgtcgcctgcacggaagccacacttcagaatacgagtgtaaccaccggcgcggctcgcgaaacgcgggcccagctcgttaaacagttttgccacgatctcgttatcacgagtacgggcgaatgccagacgacgattagcaacgctatcagtcttggcaagagtaatcagcggctcaactacgcgacgcagttctttcgctttcggcagggtcgtcttgatgatttcatgacgaaccagcgaaccagccatgttacggaacatagcctggcgatggctgctgttgcggttcagttgacgaccactcttacgatggcgcatgaccttatccttctcagtaaaaccttaacctgtgatccggttactcgtcagcaatgcttgccggtggccagttttccaggcgcatgcccagagacaaaccacgtgaagccagcacgtctttaatctcagtaagagattttttacccaggttcggcgttttcagcaactcaacctcggtacgctgtaccagatcaccgatatagtggatagcttctgccttaaggcagttagcagagcggacagtcaattcgagatcgtcaacagggcgcagcaggatcggatcgaattctggtttctcttctttcacttccggctgacgtacatcacgtaaatcaacgaaagcttccagttgttctgccaggatggttgccgcacgacgaatcgcctcttcaggatcgattgtgccgttggtttccatttcgatgaccagcttgtccaggtcggtacgctgttctacacgcgctgcttcaacattgtaggcaatacgctctacagggctgtagcatgcgtcgaccagcagacggccgattgggcgctcatcttcttccgaatgaattcgggcagaagccggcacataaccgcgaccgcgctgaactttgatacgcatgctaatagctgcgttctcatcggtcaggtggcagatcacatgttgcggcttgacgatttcgacatcaccgtcatgggtaatgtcggctgcggtcacagggccaatgccagatttgttcaaagtaaggataacttcatctttaccctgaactctcaccgccagccctttcaggttgagcaggatttcaaggatatcttcctgaacgccttctttggtgctgtactcatgaagtacaccatcaatctcaacctcggtcaccgcgcaacccggcatcgatgagagcagaatacggcgcagtgcgttaccaagagtatggccaaagccacgctctaaaggttcaagggtcaccttggcgtgcgtcgaactcacttgctcgatatcgaccaggcgcggttttagaaactctgtcacagaaccctgcattgtgtcctctctttggtactaagctttacttggagtaaagctcgacgatcaggtgttcgttaatgtccgcagacagatcagaacgttccggctgacgcttgaacgtaccttccatcttgccagcatcaacttccagccaggttggcttttcacgctgctcagccagctccagagcggctttcacgcgagattgctttttcgctttctcacgaatgctgacaacgtcattcgctttaacctgataagaagcgatgttaacaacacgaccgtttaccatgatagctttgtggctaaccagctgacgtgattcagcacgagtcgcgccgaagcccatacggtatacaacgttgtccagacgaccttccagcagagtcaacaggttttcaccggtgttgcctttcagacgcgctgcttctttatagtagttacggaactgacgctccagcacaccgtacatacggcgaactttttgcttttcacgcaactgcacaccatagtcagacagacgcggtttacgcgcaccgtgctggccaggagcttgttcaattttacacttggtatcgatcgcgcgaacgccagacttaaggaacaggtctgtgccctcacgacggctcagcttgagcttaggacccaaatatcttgccattttctttctccaacaatcctagaaacgaacgcgttatacgcgacgttttttcggcggacgacaaccgttatgagggatcggagtcacatcagtaatattagtgatgcggaaaccagcggcgttcagtgcacgaatagtagattcgcgacctggacccggacctttgaccataacttccagattcttgatgccgtattcttttacggcttcagcgcaacgctctgctgcaacctgagctgcaaacggagtggatttgcgagaaccacggaaaccggaaccaccggctgttgcccaacccagcgcgttaccctgacgatcggtaatggtaacgatggtgttgttaaaagaagcatggacatgagccacgccatcagagacttgttttcttacacgcttacgtgcacgaactggtgcctttgccattattcaatcaccccgactatttcttgatcggtttacgcggacccttacgggtacgtgcgttggtcttagtacgctgaccgcgaaccggaagaccacgacgatggcgtaaaccacgatagcaaccaaggtccatcagacgcttgatgctcagggtgatttcacggcgcagatcaccttcaacgacaaatttaccaaccgcttcacgcagggattcaatttgttcttcagacagctcactgatcttaacattttcagcgatacccgtgtcagcacagatggctttagagcgggtcttgccgataccgaaaatagcagttaatgcgattacggtatgtttgtgatcaggaatgttaatgcctgctatacgggccactatgcactcctactatttaatatgtacgcaccatgctgaaaagcccgttttcaggatactcaaatggaaacgtacagacatacaaaagattggctggctaatctagccagctcaacccaactttgcaagaaaaatatgcgaataaatcagccttggcgctgtttatgcttcggctcggcactgcaaatcacgcggatgacgccatcacgcttaacgattttgcagttacggcataatttcttgacggaagcacgaactttcatttttactctccgtaacttctcgagcgacctgttagcggccgtagcctttcaggttcgccttcttcaatgcagactcgtactgactcgacatcatcagagtttgcacttgagccataaagtccataatcacgacaacaacgataagcagtgaggttccaccgaagtagaacggtactttcattgcatcacgcatgaactccgggatcaggcagataaaagtgatgtataacgcaccgaccaaagtcaggcgagtcattactttatcgatatacttcgccgtttgctctcccggacgaattcctggtacaaatgcaccggacttcttcaggttatctgctgtttcacgcgggttgaaaaccaacgccgtgtagaagaaacagaagaagatgattgcagacgcatagagtaacacataaagcggttgcccaggctgcaaatacagcgaaattgttgtcagccagttccaaccagtaccgcccccgaaccatgatgtaatggtagccgggaacagaataatactggaagcgaagattgccgggataacccctgccatattcactttcagcggtaaatgtgtgctctgtgcagcatagacacgacgaccctgttgacgtttagcgtagtttaccacaatgcggcgttgaccacgctctacaaagacaacaaagaaggtcactgcaaatactaatactgcaaccaacagcaacaggaggaagtgcaggtcgccttgacgcgcttgctcgatagtatgggcgatggccggcgggagacccgcaacgataccggcgaagataatgattgagataccgtttccgataccgcgctcagtaatctgttcgccgagccacatcaggaacatcgttcctgagaccagactaacaacagcggtgaaatagaatgcaaagcctggattaatcaccaggccctgcataccaggcatattcggcagaccggtagcaataccgatcgactggaatatcgccagcaccagagtaccgtagcgggtgtactggctgatcttacgacgaccagactccccttctttcttcagctccgctaacggctgataaacaaccgtcagcagctggacaatgatcgatgccgaaatatacggcatgatacccaacgcaaagatagaagcacggctgagagcaccaccagagaacatgttgaacatttcaatgatggtgcctcgctgttgctcaagcagtttggcaagtacagcggcatcaataccagggatcggaataaaagagccaatacggaacacaatcaacgcaccgattacaaacaacagtctgcgcttcagttcgccaatcccacctttggcactttgaaaatctaatcccggttgcttagccatctgctacttattcctcaattttaccgccagcagcttcgatagcagcacgagcacctttagtcacgcgcaggccacgaacagttaccggacgagatacttcaccagacaggatcactttcgcgaactcgatctggataccgataatgttagccgctttcagcgtgttcaggtcgataacatcgccttctacgtgagccagatcagacagacgaacttctgcagtgatcatcgctttacgagaagtgaagccgaatttcggcagacgacggtatagaggcatctgaccaccttcgaaaccgcgacgtacgccaccaccagaacgagagttctgacctttgtgaccacgaccaccggttttaccgaggccagaaccgataccacgacccaggcgtttacccgcctttttggagccttcggccggagacagagtatttaaacgcatctcttactcctcaactttaaccatgaaggaaaccgcgttgaccataccacgaacagcaggagtatcctcgcgctctacggtgtgaccaatacgacgcagacccaggccaagcagcgttgccttgtgtttcggcagacgaccgattgcactgcgggtttgagtaattttaatagtctttgccatggtttatttccccagaatttcttcaacggatttaccacgcttggcagcgaccatttctggagaattcatattttccaggccatcaatagttgcacgaaccacgttgatcgggttggtggaaccatatgctttggccagaacgttatgaactccagcaacttccagaacggcgcgcattgcaccaccggcgatgataccggtaccttcggaagctggctgcatgaatacacgagaacccgtgtgaacacctttaaccgggtgctgcagggtgccgtggttcagcgcgacgttaatcatattgcgacgggctttttccatcgctttctggatcgctgctggaacttcacgcgctttaccgtaaccaaaaccaacgcgaccgttaccgtcacctactacagtcagagctgtgaaggagaaaatacgaccacctttaacggttttagatacgcggttaaccgcgatcagcttttcctgcagttcgccagcttgtttttcgatgtgagccatcttacacctctaccttagaactgaaggccagcttcacgggcagcatctgccagtgcctggacacgaccatgatattggaacccggaacggtcaaaggaaacatctttgatgcctttttccagagcgcgttcagcaacagctttacccacagctgctgccgcgtctttgttaccggtgtacttcagttgttcagcgatagctttttctacagtagaagcagctaccagaacttcagaaccgttcggtgcaattacctgtgcgtaaatatgacgcggggtacgatgtaccaccaggcgagttgcacccagctcctggagcttgcggcgtgcgcgggtcgcacgacggatacgagcagatttcttatccatagtgttaccttacttcttcttagcctctttggtacgcacgacttcgtcggcgtaacgaacacccttacctttataaggctcaggacgacggtaggcgcgcagatctgctgcaacctggccgatcacctgcttatcagcgcctttcagcacgatttcagtttgagtcggacattctgcagtgataccggccggcagtttatgctcaacaggatgagagaaacctaaagccaggtttactacatcccctttgaccgctgcacgatagcctacaccaaccagctgaagctttttagtgaagccttcggtaacaccaacaaccattgagttcagcagggcacgcgcggtaccagcctgagcccatccatccacgaaaccatcacgcggaccgaaggtcagagcattatctgcatgtttaacttcaacagcattgttgagggtacgagtcagctcgccgtttttacctttgatcgtaataacctgaccgttgatttttacatcaacgccggcaggaacaacgaccggtgctttagcaacacgagacattttttcctccgattaggctacgtagcagataatttcgccaccaagaccagcctggcgcgctgcacgatcggtcataacacctttagaggtagaaataaccgcgatacccagacccgccataactttcggcagctcatctttacgtttgtagatgcgcagacctgggcggctgacacgctgaatgctttctacaacagctttaccctggaaatacttaagagtcagttccagttccggcttgatgtcgccttcaactttaaaatcttcaataaagccttcttccttcagcacgttggcaattgccactttcagcttggaggaaggcatggtgaccgcagctttattcgcggcctgaccgttacggatacgggtcagcatatccgcgatcggatcttgcatgctcatctgtctttactcccgtgattcaattggtgacaattaccagctagcctttttcagacccgggatttcaccgcgcattgcggcttcacggaccttgatacggctcaacccgaacttccgcaggaaaccatgcggacgacctgtttgacggcagcgattacgctgacgagacgggctggaatcacgcggcagagtctgcagcttgagaacagcattccaacgatcttcgtcggttgcgttcacatcagagatgatagctttcagttcagcgcgtttagcgaagaatttatcagctaaagccacgcgctttacttcgcgtgctttcattgattgcttagccattaagtaaccctaccttacttgcggaacgggaagtcaaaggcagccagcagagcgcggccttcttcatcagatttcgcagtagtggtaatggtaatatccaaaccacgaacgcggtcgactttatcgtagtcgatttctgggaagatgatctgctcacggacacccatgctgtagttgccacgaccgtcgaaagacttagcggacaagccacggaagtcacggatacgcggtacagcaatagtgatcaggcgctcaaagaactcccacatgcgttcgccacgcagagttactttacagccgatcggatagccctgacggattttgaagcctgcaactgatttgcgtgctttggtgatcagcggtttttgaccggagattgctgtcagatcggctgctgcgttatccagcagtttcttgtcagcgatcgcttcaccaacacccatgttcagggtgatcttctcgacccgagggacttgcatgacagaattgtagttaaactcagtcatgagttttttaactacttcgtctttgtagtaatcatgcagtttcgccatcgtactactccaaattacttgatagtttcgctgttagatttgaagaaacggacttttttgccgtcttcgaatctaaagcctacacggtcagccttgccggttgccgcattgaagattgcaacgttagaaacctgaatagcagcttctttttcaacgatgccgcctggttggttcagagccggaaccggcttctggtgtttcttaaccaggttgataccttcaacaatgagcttgccggaagacaagacattcttaactttaccgcgtttacctttatctttaccggttaacacgataacttcgtcatcacgacggattttcgctgccatgattcgctccttagagtacttctggggccagagagataattttcatgaacttctcgttacgaagttcacgagttaccggcccaaaaatacgcgtaccgatgggctgctcgctgttattgtttaaaataacgcatgcattaccatcgaagcgaatgacagaaccgtccgggcgacgaacacccttcttggtgcgcaccactaccgccttcagcacatcaccttttttgaccttaccacgcggaattgcttctttgatggtgatcttgatgatgtcgcctacgcctgcgtagcgacggtgcgagccacccagaaccttgatacacattacgcgacgtgcaccggagttgtcggcgacgttcagcatagtctgttcttggatcattttagtgctccgctaatgtcaactactactgagacccaaaaatagggtcgttaaaaaagccccatatcgagggcgcggcattataacaccgcaaatcagatatgggtagaaaaaataaacggctcatcgctgagccgtttatccgtatcgagaatgcgtactctattacagaaccgctttctctacaacgcgaaccagcgtccaggacttagtcttggacagcggacggcattcgcggatttcaaccacgtcgccgataccgcattcgttgttctcgtcatgtacgtgcagtttggtcgtacgcttgatgaatttgccgtataccgggtgtttcaccatacgttcgatagcaacaacaatggatttctccattttgtcgctaaccacgcgaccttgcagagtacggattttatcggtcattacgcacccgccttctgagtcagtaaagtcttaacgcgtgcaacatcacgacgcacttgcttcagcagatgagtctgttgcagctggccacttgcagcctgcatacgcaggttgaactgctcacgcagcaggttcagcagctcagcgttcagctcttcaacgcttttttcacgcagctcttttgctttcattacatcaccgtcttagttacaaaggtggttttgatcggcagtttcgctgctgccaggccgaatgcttcacgggccagctcttccggtacgccgtccatttcataaaggactttacccggctgaatcaaggcaacccagtactccacgttacctttacctttacccatacgaacttccagcggcttctcggtgatcggtttgtccgggaatacacggatccagatcttaccttgacgcttaactgcacgggtcatagcacgacgtgctgcttcgatctgacgtgcagtcagacgaccacggccaacagctttcagaccgaaagtgccgaagctaacatccgtaccctgcgccagaccacggttgcggcctttgtgcactttacggaattttgtacgctttggttgtaacatcagcgacgctccttatttacggcctttacgctgctgctttttaggttgagcagccggttccggttgttcaacagcagccataccacccaggatctcacctttgaagatccataccttaacgccgattacaccgtaagtggtgtgcgcttcagaggtgttgtagtcgatgtcagcacgcagagtgtgcagcggtacgcgaccttcacggtaccattcggtacgtgcgatttccgcgccgcccagacggccgctaacttcaactttgatacctttagcgcccagacgcattgcgttctgtacagcacgcttcatagcacgacggaacataacgcgacgttccagctgagaagtgatgctgtcagcaaccaatttagcgtccagttcaggcttacgaacttcggcaatattgatctgtgcaggcacgccagcgagatccgcgacgaccttgcgcagtttttctacgtcttcgcctttcttaccgataacgatacccgggcgagcagtgtgaatggtcacacggatgcttttagccggacgctcgataacgatgcgagatacagacgctttcgccagttccttagtcaggtactgacgtactttaaaatcgctgtccaggttgtcagcgaattctttggtgttcgcaaaccaggttgagttccatggttttacaatacccaggcgaataccattaggatgtactttctgacccattgctagtctccagagtctcagcgatcggacacaaccacagtaatgtggctggtgcgcttcaggatgcgatctgcacgacctttagcacgcggcataatgcgcttcatgctcgggccttcgtctacgaaaattttcgcaactttcagatcatcaatgtcagcgccatcgttgtgttcagcgttagcaatggcagattccagtaccttcttgaccagtacagcagctttcttattggtgtaggtcagaatatccagggcctgcgacactttcttaccgcgaatcaggtcagcaacaaggcgaaccttctgagcagaagaacgagcatggcgatgttgagctaaagtttccatctcttcctcctaccttatttcttcttcgcttttttatcagcagcgtggccgcgataagtacgagtcggtgcgaattcacccagtttgtgaccaaccatttcgtcggaaacaaaaactggaacgtgctgacgaccattatggacagcgatggtcaaaccgatcatgttaggaaagatcgttgaacgacgggaccaagtgcgcaggggcttcttgtctccgctttccaccgctttctctaccttcttcagcaagtgcaggtcaataaaaggacctttcttgagagaacgtggcatggcttatcctctaaaattatttgctacggcgacgtacgatgaatttatcagtacgcttgttgctgcgggtcttcttacctttggtctgaacgccccacggagttaccgggtgcttaccaaagttacgaccttcaccaccaccatgtgggtggtcgactgggttcatcgcagtaccgcgaacggtaggacgaacaccacgccagcgtgcagcacctgctttacccagaacgcgcagcatatgctcagcattgccaacttcgcccagagtagcgcggcagtctgcttcgactttacgcatttcaccagaacgcagacgcagggtgacataagcaccatcgcgagcaacgatctgaacgtaagtaccagcggaacgagccagctgaccgcctttacctggtttcatttctacgttatgaacggtagaaccaaccgggatattgcgcatcggcagggtgttgcctgctttgattgcagcatcaacgccagattgaatctggtcgccagctttcaggcctttaggggccagaatgtaacggcgctcaccgtctttgtacagaaccagcgcgatgttcgcggagcggttcggatcgtactcaagacgttcaacaactgccgggataccatctttgttgcgtttgaagtcaacaatacggtaggcctgtttgtgaccaccaccgatatgacgggtggtgatacggccattgttgttacgaccaccggatttgctgtttttttcaaccagcggagcaaaaggtttgcccttgtgcagctctgggttgaccactttaacaacgtggcgacgacccggagatgtcggtttacatttaacaactgccattgtattactcctccgacttactcagcgccgccgacgaagtccagattctggccttccttcagggtgacgtaagcttttttccagtcgctacgacgaccgatacgctgtccgtgacgtttaactttccctttaacaaccagggtgttaacgacttcgacttcgacttcaaacagtttctgcacagcagctttgatctctgctttggtcgcgtctttagcaactttgagaacgatggtgttagttttttccatcgcagtagacgctttttcagaaacgtgcggtgcgcgcagcaccttcagcagacgttcttcacgaatcatgccagcatctcctcaacttgcttaacagcatcagcagtcattacgactttgtcgaaggcgatcaggctaaccgggtcgataccagttgcatcacgtacgtcaaccttgtgcaggttgcgcgcagcaaggaacaggttctcgtccagctcaccggtgatgatcagcacatcttccagagccatgtctttcagtttctgtgccagcagcttagttttaggcgcttctacagagaaagattcgacaacgatcagacgatcctgacgtaccagttcggacagaatgcttttcagcgcgccgcggtacatctttttgttaactttttgactgtggtcctgcggacgcgcagcgaaggtcacgccacctgaacgccagatcgggctcttgatagaacctgaacgcgcacggccggtacctttctggcgccacggctttttgcctgaaccagttacttcagcacgagtcttctgagcacgagtaccctgacgagcaccagctgcataagcaactacaacctggtgaaccagcgcttcgttgaaatcacgaccgaaggtagtttcggaaacagtcagcgcgctctgcgcgtctttcaatactaattccattgctatccccttacgccttcacagctggtttaacgatcaggtcgctaccggttgcacccgggaccgcgcctttaaccagcagcaggttgcgctcagcgtcaacacgtactacgtccaggctctgaacggtgacacgttcgttacccagctgacctgccattttcttgcctttgaacactttgcccggagtctggttctgaccgatagaacccggaacgcggtgagacaaggagttaccgtgagtagcgtcctgggtacggaagttccagcgcttaacggtaccagcaaaacctttacctttagaggtaccggttacgtcaacttttttaacgtcagcaaacagctcaacgctaatgtcctgacctacggtgaactcttcgccgtcagccagacggaattcccacagaccacggccagcttctacgccagctttagcgaagtgacccgcttccggtttggttacacggttagcttttttagcaccagtggtcacctgaacggcacggtagccatcgttagccagatctttaacctgagtaacgcggtttgcttcaacttcgattacggttactgggatagatacgccatcttcagtgaagatgcgggtcatgcccacttttttaccgactaaaccaatcattgtttcaacctctcaatcgctcgatgacctgattaacccaggctgatctgcacgtctacaccggcagccagatccagacgcatcagagcatcaacggttttttcagttggctcaacgatgtcaaccagacgcttatgagtgcggatttcgtactgatcgcgcgcgtctttgttaacgtgcggagagatcagaacggtaaagcgctctttgcgggtcggcagcgggatcggaccacggacttgcgcaccagtgcgcttagcagtctcgacgatttccgcggttgattgatcgatcagacgatgatcaaacgctttaaggcggatacggattctttggttctgcatgagaccagagctccaattattttatagacgaaatggttactcctcatacccattacgattgatgggagagtgtaaccgttcttacatagttccccaattgggaacattgtttggtagcgtgtcgctgctaccagggttcatatcgaaccggccgtcaactttgacaggcccgcgcattatacgcaaattcagcgacaacgcaagggatgcgtacaaaatcatcacttgtttctgcgagctcacttccaggcccctcgcaatgccatgaaaggccggcaaatactctggagcgggacatccattcctgtttattgccttttgccagaggcttggctcctgcatcacactcagtacccagggccaccacatggaaaccatcgatgatagcgactttggcattctttattatttatggcgggttattactcacgctttgttggcacgatctgcgctatggcttgctacccgataaatttacctgccctctgctgtggggcgggttgctttattatctgtgtatgtcaccagccaatctgcagcatgcagtctggggagcgatagcaggctatctggcctttgcgttgatctattggctctacaggggaatacgcgggcgtgaaggcatcggctacggcgatgtcaaatttctcgccgcactaggggcatggcagggatggagagttttaccgcagctcgttcttatagcaacaattctcgcctgcgctgccgtaacggttctgattctgtgcggcaaacacaggcaggcattacgcaacccgctgcctttcggccctttcctggccacagcgggtttgctatgtggttggcaaactttttttagtcagccactttaatctgcgactgaagataattctgcagaccaattttacctatcaaatccagctcggtttccagccagtcgatatggccttcttcgtcggcgaggatggtgattaacatatcacggctgacgtagtcgtggacgctgtcagcataggcaatggcttctcgtagatcctttgccccttccagttccagcctcaggtcggattgcagcatctcctccacatcctctccgatgcggagtttgccgagatcctgcaggttcgggatcccttcgagaaataaaatgcgctcgatatacttatcggcatgcttcatttcatcgatagattcgtggtactcgacatcattgaggcgcatcaggccccagttcttgaacattctcgcatggagaaagtattgattaattgcgactagctcatttcccaataatttattgagataacttatgattttgacatcacctttcattatataatccctccgcttccacttattgaagcgtagttcgggctatagggatgtcaaagtaaagctgagaggcttcaggcgatctcttgatattccggcatgcgggttaattcatcttccataatttctcgtgctgcacgaacgcacttaccacattgatttccaacgggaataaattttctcagctgctgaaaagactgaggattgaattggcgcacagcctgacgaatttttttatcgttcacaccattacacagacaaacgtacatatatactcccgttcaacttacagacaaagtgtaaatgagaatagttatgattacaatagcctgtttattaaataggcgtttgatctctttgctgtcagtcagtgtgctgcttcacgcaaatagcagacagcaaaaagggcgccttagcgccctttttaattcagaactaaatattagcccagaactttagcaacaacgcccgcgccaacggtacggccgccttcacggattgcgaaacgcagaccgtcgtccatcgcgatcgggtggatcagggtaacaaccattttgatgttgtcgcccggcattaccatctctacgccttccggcagttcgatggtgccagtcacgtcagttgtacggaagtagaactgcggacggtagcctttgaagaacggagtatgacggccgccttcgtctttggacagaatgtacacttcagattcgaacttggtgtgcggcttgatagaacccggcttagccagtacctgaccacgttcgatttcttcacgtttgataccacgcagcagaacaccaacgttctcaccagcacggccttcgtccagcagtttgcggaacatttcaacgccagtacaggtagacttcgcagtctctttgataccaacgatttcaacttcttcgccaactttgatgataccgcgctctacacgaccggtaacaacggtaccacgaccggagatggagaatacgtcttcgatcggcagcaggaacggcttgtcaatcgcacgctctggttccgggatgtaagaatccaggtagccagccagttcgatgattttcgcttcccagtctgcgtcgccttccagcgctttcagagcggaaccgcgaacgatcggagtgtcgtcgcccgggaaatcgtactgagacagaagttcacgaacttccatttcaaccagttccagcagctcttcgtcatcaaccatgtcgcatttgttcaggaacacgatgatgtacggaacgcctacctgacgacccagcaggatgtgctcacgagtctgcggcatcgggccgtcagtcgcagcaacaaccaggatcgcgccgtccatctgcgcagcaccggtgatcatgtttttaacatagtcggcgtggcccgggcagtctacgtgcgcgtagtggcgagtcggggtgtcatattcaacgtgagaagtgttgatggtgataccacgagctttttcttccggcgcgttatcgatctggtcgaatgcgcgagcagaaccaccgtaggttttagccagaacggtagtgattgcagcggtcagagtagttttaccatggtcaacgtggccgatagtaccgacgttgacgtgcggttttgtacgttcaaatttttctttagacacggctatattccttactatagtgctctccccttctggagagagcacgggactttggttttaaccctgcggcttatttaccacgggcttcgattacggcctgagcaacgttgttcggcgcatcatcatacttcaggaactccatggagtaagaagcacgacctttggtcagagaacgcagctgagttgcatatccgaacatttcagacagcggaacttcagcgtggatcacaacgccagtcacgttggattcctgaccgcgcagcataccgcgacgacggctaaggtcaccgataacgtcaccagtgttctcttccggagtttctacttcaaccttcatgatcggctcaagcagaactggtttcgctttcttaaagccatctttaaaggcaatagaagcggccagtttaaacgccagttcagaggagtcaacgtcgtggtaagaaccgaagtgcagacgcacgcccagatcaactaccggataaccagccagaggacctgctttcagctgctcctggatgcctttatcaacggccgggatgtattcgccaggaattacaccacctttgatgtcgttgatgaactcataacctttcgggttagagcccggctccagtgggtacatgtcgataacgacgtgaccgtactgaccgcgaccaccagactgtttagcgtgtttaccttcgatatcggtaactttcgcacgaatcgcttcgcggtaagcaacctgaggtttaccgacgttcgcttcaacgttgaattcacgcttcatacggtcgacgatgatgtcgaggtgcagctcacccataccggcgatgatggtctggttagattcttcgtcagtccatacgcggaaagacgggtcttctttagccagacggcccagagccagacccattttttcctggtcagctttggttttcggttcaacagcgatagagattaccggctcagggaattccatacgctccagaatgatcggcgcattaggatcgcacagagtgtcacccgtagttacgtctttcagaccgatagcagcagcgatatcgcccgcgcgaacttctttgatctcttcacgtttgttagcgtgcatctgtacgatacgaccgaaacgctcacgtgcagctttcacggagttcaggatggtatcaccagagttaaccacaccagagtatacgcggaagaaggtcaggttacccacgaacgggtcggtagcgattttgaatgccagagcagcaaacggctcatcatcgctagcgtgacgctcagccggagtatctttaccatcgtccaggataccgttgatcgcaggtacgtcaaccggggatggcaggtagtcaactaccgcatccagcatcgcctgaacacctttgttcttgaacgcagaaccacaggttaccaggatgatttcgttgttcagaacgcgctgacggagagcagttttaatctcttcttcagtcagttcttcaccacccaggtatttctccatcagctcttcagaagcttcagcagcggactcgatcaggttctggtgccattcttcggccagttcctgcatgtctgccgggatatcttcgtaagtgaaggttacacctgcgtcttcttcgttccagttgatggctttcattttcaccaggtcaacaacaccggtgaacgcttcttcagcgccaatcgccagctgcagcggaacagggttcgcgcccagacgggttttgatctgaccaacaactttcaggaagttcgcacccatacggtccattttgttaacgaacgcaatgcgcggaactttgtatttgtttgcctgacgccatacggtttcagactgaggctgaacaccaccaactgcgcagtaaaccattactgcaccatcaagcacacgcatggaacgttctacttcgatggtgaagtcaacgtgccccggggtgtcgatgatgtttacgcgatgcggttcatactgcttagccatacctgaccagaatgcagtagtcgctgcggaggtgatagtaataccacgctcctgctcctgttccatccagtccatggtggcagcgccgtcatgaacttcaccgattttgtggtttacaccggtgtagaacagaatacgttcggtagtagtagttttaccggcgtcgatgtgcgcactgataccgatgttacggtagcgtgcgatgggtgttgtacgagccatttgattcctcgtttatttctttaggcgttcagttaagttatccaaaacgggcgacttatctgaagcgcccgcctggtgactaatactccgaagggattaccaacggtagtgtgcgaacgccttgttggcttctgccatacggtgaacgtcttcacgtttcttaactgcagtacctttgttgtctgcagcatcagaaagttcgttcgccagacgcagagccatggatttatcaccacgtttacgagcagcttcaacgatccaacgcattgccagagcattacgacgaaccggacggacttcaactggaacctgataagtagaaccaccaacgcggcgagacttaacttctacagtcgggcgcacgttgtcgagagcgacttcgaaagcttccagttcatttttaccagagcgctgagccagggtctccagcgcgctgtatacgattgcttctgcagtagattttttaccatctaccatcaggatatttacaaatttagccagcagttctgatccgaacttaggatccggcaggattttacgctgaccaatgacgcgacgacgtggcatggaaatactccgttgttaattcaggattgtccaaaactctaagagtttagtttgacattaatataaaacgtttggccttacttaacggagaaccattaagccttaggacgcttcacgccatacttggagcgagcttgcttacggtctttaacgccggagcagtcaagcgcaccacgaacggtgtggtaacgaacacccggaaggtctttaacacgaccgccacggatcaggatcacggagtgctcctgcaggttgtgaccttcaccaccgatgtaggaggtgacttcgaaaccgttagtcagacgcacacggcaaactttacgcagtgcggagttcggtttcttaggagtggtggtatatacacgagtacatacgccacgtttctgcgggcaggcttccagcgccggcacgttgctctttgcaactttgcgcgcgcgtggtttgcgtaccagctggttaattgttgccattaaatagctcctggttttagcttttgcttcgtaaacacgtaataaatcgcctcatataatatgaggacgcagaattttagggcggtgccgaaaaggtgtcaagaaatatacaacgatcccgccattaccaggacaactgacctgcatgtttgactgaaagtctgacgaaatcagtatagctaaccctgacgacactgtccgcaatttgaccagccagcccgcgggcttcgatatcttcttgcagagcgtagagggatatgggggcagattgcaggatttcaaggaaacggccttccgcgagagcggcgataacgccgtccgacagcagcagaagatcgtcgccctcttttagcaaacggagcatagccgccatatcggcgtgccagggagatgtgcttagcgtgtggagcattcgagcctcagaaccgcagtatcacgttaaaatcgtcaagccgggcgcgcaaagcctctggctccagccattcgccatcaacaacccacggcgtggcagaattcagaccgcgctcccgtgctgaagcagcgcaaatccagcactgttcgatatcgtatagcgataagagcttaaaggtggagatatagtcgcgcgccagcaccgctgcggggcgctgcccgggaagaagctgaaagacgccatcgcccacgaagaaaacgccgatctcttccgtcagcgcggaggttgccagcagggcgtccagcccttccctgcccgacgctgaaccatgaggcgcagacgaaaaaacaaaggctacgcgcttcatcagaactgcaccatgcgatcgcaggttaacgcggcttccgccagcgcgcccaatccgctcaaggtaaagcccggctgcaaattatacccaggcaaattcagctgccgggcttcctgttcatcagtgattccacggcgtaacgctgcggctacacagatatgcaaggaaacggcgtgttcgtcatgcagcgtctgccaggcccgaaccagatcaaattcgtcgctggcgggcgccgtgagctgattcgcgttatagacgccttcacgatagaaaaagacgctgagcaactcgtggccttcctgcaaaacggcgcgggcaaactgtagtgcgctgctggcctgctgggtaccataagcgggccctgttaccgtaatggcaaagcgcattacttatccagcccctggaaatctccacttttgaactgacgaatgtagagatataccgtgtgcttagagatattcagccgatcggccacctgattgatggcatctttgatatcaaagatccccttctcatagaggttcaggacgatctgccgatttttagcgttgttagaaacgttacggtcagcgttcacctcttcaatcgtgaactcaagcgtctgggccaccagatcgtcaaccgatgaagcaaagttgacctgggaattcacctccgtcgtttccggcggaataaaggtgctcatgatttgtgagaaagggacatcaaggttcatgttgatgcacagcaggccaatgacccgatggtcacggttgcggatagcgatagtgaccgatttcatcagcacaccgcttttggcgcgagtaaaatagcatttggaaacgctgctatcggctccagtcatatcgtgcagcatgcgcagcgcaaggtcggtaattggcgagccaatttgacggccggtgtgttcaccgttggcgatacgaatagcggaacattttaagtcctgcaatgagtgcaatacgatttcacagtgggaaccgatgagcatcgctaacccgtccactaccgcttcataggatttaaggatatcgaagtcggtctggtcaaaaggacgttgatccagcaaatcaagctcactggtctcgttggttaaaagcgacctggacatgaaaaaaagcactccttttcaggagcctgtcgttatcgtcagggcaggctcatcatcattattaatctatctaaagtaatacagcgcctgaggttctttccagttttaattatatctgcccgcaataaaaaaaccgccgcccctggaggcggcggctcaaaaccgattacttcttagcgtcagcggctggcgcttcagcagcggcttcaggcttggcgtccgctttcggcgccggtttaatatccagcagctctacatcaaataccagagtagagtttgccgggatacccggtacgccagttttgccgtaagccagatccggtggaatgaccagctggattttaccgcctttcttgatgttcttcaggccttcggtccagcccgggatcacgccgtccaggcggaaggaaagcggctcgccgcgggtataagagttatcaaactctttaccgtcgatcagcgtacctttgtagttgacgacaacggtatcgctgtctttcggcgtttcgccggtacccgctttctcgactttgtagagcaggccagatttagacgtttttacgcctttctctttggcaaaggcgtcacggtaagctttgccttttgcttcattctcagaggcgtctttttccattttctgctgagcagcagtttttacacgtgtttcaaacgtctgcagagtctgttcgatctcctgatcggacagtttgctcttatcagcaaaagcgtcctgaacgccggcgatcagctgatctttatctaatttgatgcccagcttttcttgttctttcagggagttttccatgtaacgtcccagcgatgcacccagcgcataagcagatttctgatcgtcatttttaaatgccgatttgctgtccgttgcgggtgccgctttcgctgtagtctcagcagcgaagctcagcggtgcattcagggcgatggccatagtggtcgccagcagcgttactttaaacagtgatttcatccatttctccagggccggggcatctcaccccagggttatcgtaaaaaacaaaaaacgtactatagaacgttgcagaacaaatcaacatacagacgtacctgaatatcgcctcatttaggactatttttgtataaattagtttcctgtcagacgtaacgatgctgcgcggatgctgaaacttcagtagaatccgcccgcaggataagacagaagaggttactcatgcacaatagcactttagagactcgccttgcggagctggagagcagactggcgtttcaggaaatcactattgaagacctcaacaagaccgtcaccgcccacgagatagaaatggcgaggatgcgcgaacatatgcgcctgatggtcgaaaaactgaaagccactcagccttcgcatatggcttcacaggcggaagaaacgcccccgccgcactattaagacgtaaaaaaagcgggtttccccgcttttttctattccgcgacgcgagcgcagcggaattagtggcagccgcagccgccgttgccgccgcagccgcctttgccatgttcgtggtcatggtcatggccgtggccaccgcagcaaccatcatgatcgtggtcgtggccatgatcgtgcccgtgagcaccgtgtacatgaccatgctccagctcttccgccgttgcttcgcgaatcgcgacaacttcaacgttgaacttcagattctgaccagccagcatgtggttaccgtcaacaacaacgtgttcgtcacccacttcggtgatttctaccggtaccggaccctgatcggtttccgccaggaagcgcatgccaacctgcagttcatcaacgcccataaatacgtctttaggaacgcgctgaaccaggttttcgtcgtactgaccgtatgcatcgttagcgccgacttcgacgtcaaatttgtcgccaacgtcgtggccgtccagcgcgttttccaggccggaaatcagggaaccgtgaccatgcaggtagtcaagcggcgcgcttaccggagactcatcaaccaacacaccgtcttctgtacgtacctgataggccaggctgaccaccaggtcttttgctactttcatgatatctcctgagcatgggaagaatagtggcgcagattgtagcggaattctgcacccgtgtaccctctagcttaaaaaaagccgatagataacgctagtccggatgaaaaatgcctatcacttgctcttctttgcgaacatgctcacggacctctttatccgcctcacgcatctgatgaccgcacttaacgcactcaacaatatcgacattattctcacgccacatcgccagcgaatcctgggcctggcacgccgggcatttcgcaccggcgataaaacgtttacgcacagccatatcatttacctttattcaaattcatcccagccgtctaactgcctgctctctttttgcatctcgcgctgaaaaatctcctccagctcgcgtctggcttcccgcacgcgggatatctgcagggtatcactatgcaccggcattaactcacgcagcatccgcatatcgaggcgccgaaaatgcagctgggcgcgctgcgcctgatggggatgcatgccgagcgagataagcgcttttcgtcctagctccagcgcgctggagaaggtttcgcgggaaaactgcgccactcccgcctgcagcagctcatgggcctcaacgcgtccccgcgctcgcgccagaatatggagatgtggaaagtgttgttgacacatctccaccagcttcatggtatcttccggctcgttgcaggtgataacgatcgactgcgcgtcttcggctcccgccgagcgcaggagctccagctgcgtcgcatcgccaaaataaactttatagccatatttacgcatcagattgaccgcgctgatatcgcgctccagtaccgtaatacgcattttgttcgccatcagcagacggccaatcacctggccgaaacgcccaaaaccaacgatgatcacctgcggtttgtcatcttcaacccacggagcctcgccctcctcttcaggttggttcaatcgccgcgaaaggactttatcgatgagcttcatcagcagcggcgtggtcatcatcgataatgtcaccgtcaccagcagcagggccatctgatcgttttgaaacaggcgaagcgaagcggggagtgagaacagcacaaaggcaaactctcccccctggctcagcacgccggcaaactgcacccgttcagagctgcgcaggccataaacccgtgccagaagatacaggacgagaccttttaccgtcaccagtatcgcgacgctggccacaacccacagtaaatgggtatagagcaccccaaggttcagcgccatgccaacggaaataaagaacagcccgaggagaagccctttaaacggctcaatggcgatttccagctcgtggcgatactcgctctctgccagcaggacgccggcgataaaggtccccagcgccatcgacaaaccgagcgcatccataaacaacgccgatccgagaaccagcagtagcgtcgccgcggtgaagacctcccgcacgccggatccggcgataaaccgaaataccggcctcagcagataacgaccgccaaccagcattccgccgaaggccagcaccttcatcccgatggtgagccagttaaaatggtcgtcacctgaccctgcgagcaggggaactagcgccagggccgggatcacggccagatcctgaaacagcagtacggagaagcccagctgcccggactcgctgcggctcatgcctttctcccgcatcagctgcagcgccatcgcggtggaagacatcgccagcccaatcccgccaaccaccgcagcgcgccatgagaagtcgctaagcatgagcaaaccgccaagtatcagcgcgctgaaggcgacctgagcggccccgacgccgaaaatggagcttctcagccgccacagcttggacggattcaactccagtccgatgataaacatcagaaagacgacgcctaattctgagaagtgaagaatttcatccacatcgctgatgaagcctaatccccaggggccgatggcgataccggccagcagatacccgagcacggcaccaatacccagcctcgccgccagcggcaccgccactacggcggcaaacagaaataacaccccggccagcagtaaatcagctcccgccatttggacctcccgccgttacagggttagccagccaatcgcggtaggcgcgagcgcggcttttcagatcgtcgggtgattgccgacgcgcccagtagacgataatcgggctcatccagtgcatgcggcacataccggcggtcagttcgaaagggcggagaatatcattcatcggataacgatgggcatcgcgccggtaggcgctctccggctcgccggtagtaatgacgctacgccagtactttcccgccagctgattccctcccgccccgctggcaaagccgcggctgagcaccctgtccagccactctttcatcagcgccgggcagctccaggtatagagcggatgctggaaaactatcacctcatgctggcgcaggagatcctgctcgcaggcgatatcgataaaaaaatccggatagtgcgcgtagagatcgtgcacggtaacattcgacaactgtaaggccggttcaagcaaaacccggttggccacggaatcctgagattctgggtgggcatacagcagcaaaactttcgctgtctgagacatctttcccctcccgaacgtcttctggcggcctgtgcagcggctgcgtcccgacgcaaccagaatgactttgtgtatcatcttcattttgggctaccattgcggcccggttgagcgattcgctcgacactacattatcataatgacaaattaacatagtcagaacatacggcgccttatgattgttttctcctccttacaaattcgtcgcggcgtacgcgtcctgctggacaacgctaccgccaccatcaacccagggcaaaaagtcggcctggtgggtaaaaacggctgcggtaaatccacgctgctttcgcttttgaaaaacgagattagcgccgacggcggctcaatgaccttccccggcagctggcagctggcctgggttaatcaggaaacacctgcgcttgcgcagccggctattgactatgttattgatggcgatcgcgaattccgcaagctggaggcggacctgcacgaagccaacgaacgtaatgacggccatgccatcgcgacggtccacggtaagctggacgccatcgacgcctggaccatccgctcgcgtgcggccagcctgctccacgggctcggtttcagcaacgaacagcttgaaagaccggtgagcgacttttccggcggctggcgtatgcgtctcaacctcgcgcaggcgctgatttgccgttccgatctgctgctgcttgatgaaccgacgaaccacctcgatctcgacgcggtcatctggctggagaagtggctcaaaggctacccggggaccctgatactgatctcccacgatcgcgattttctcgatccgatcgtcgacaaaattatccatatcgaacagcaaacgatgttcgagtacaccggcaactacagctcatttgaagtgcagcgcgcgacccgtcttgcgcagcaacagtcgatgtatgagagccagcagctgcgcgtcgcgcatttgcagagctacatcgaccgttttcgcgctaaagccaccaaagctaaacaggcgcaaagccgtatcaaaatgctcgagcgtatggagctcatcgcccctgcccacgttgataacccgtttcactttagcttccgcgcgccggaaagcctgcccaatcccctattgaaaatggaaaaggtcagcgccggttatggcgagcgcgtgatcctcgactcaatcaagctgaatctggttcccggttcgcgcatcggtctgctggggcgtaacggggccggtaaatcgacgctgataaaactgctggccggcgagctacagccgctgcagggtgaaattggtctggcgaaaggcatcaagcttggctactttgcccagcatcagctggagttcctgcgcgccgacgaatccccgctgcagcatcttgcccgtattgcgccgcaggagctggagcagaagctgcgcgactatctgggcggtttcggcttccagagcgataaagtcaacgaagagacaaagcgtttctccggcggcgagaaagcgcgcctggtgctggcgttaatcgtctggcagcggcctaacctgctgctgcttgatgaacccaccaaccacctcgatctcgatatgcgccaggcgctaaccgaagcgctcattgattttgagggcgcgctggtggtggtttcgcacgaccgtcatctgattcgctccaccaccgatgacctttatctggtgcacgacagcaaagtcgaacctttcgatggcgatcttgaagactatcagcagtggctgagcgactcgcaaaagcaggaaagccagacatcggaagagccaaaggaaaacggcaacagcgcccaggcgcgtaaagatcagaaacgccgggaagccgaactgcgtacgctgacccagccgctgcgcaaagagatcgcccgactggaaaaagagatggagaagttcaacgcgcagctggcgcaggcggaagagaagctgggcgacagcgaattgtacgatcaaagccgcaaagccgagctcactgcgtgtctacagcagcaggccagcgcgaagtccgggctggaagagtgtgaaatggcctggctggatgcccaggagcagctggagcagatgctacaggaaggctagcggcaatatgccatacgtgaaggcgggctaacccgccttttttcatcctccgcaccctggcttagcgctgcgccgccagtcgggcgcggatctgcgacagcgaggcatagccgtacagcttgccatccagaaagcgcgtttttaactcgccctgctgctcctgttccagcgtttgcccatcgtacagctgcagttcccccaaggcgtcgcgttccacgcgcagcagaccacgcgccgaacgtttaagaccattatcggttttcggctccttaaagagggctcttccctcgccgttcacctccccccaggttgccttcatcgcgaagccgaaggtatcgcgggtgttgtactggtaggtaaatgaacccacgccgaacaccacgttagcgctggcaaaacctttcgcttccaggcgacgcaggatctcatccgctctggcgagagtaatggaatcgccgtaaatcaggccgacatgcggatccagcaccttgtatcctttttcgttgatagtgccgccaaaaatttcccacagaatctccacggagcctttctcctcggcgctgcgctcgctgcgggtgtcgtcgtcagctgcggttccgcacagaatcgccaccggatcgccgctgtccggacggaataccacgcgcccctgacgctgcataattattgcctgcagctcgcgggtgtattcggtcagcacctgccagtagtcccaggtatccgagacgatagagacgaaaccctgcgggtggacttcggtaatcagccggcgaaaggtttcaatttcccgctcgcgctcgcccatacacatcacgctgtgttccgtagccggaatgctggcgccgatgagctcatcttcaccgcgagtgtaataatcacgggcatacagcagcgaaggcaggctatcggtccctttgaagctggccagatgtccgcagcccgactgcgcagtgtcgtgcagtccggacatcccccgaaacgaaaagtcgtgacattggaaatcaaggtgcgtcagatcgctacaggttttctccgcccagcgttcgcaaatcaggcgatagtggtgggcgatggtcgcgttggttgacactttccacagctccgccgaaagcaccgtctccagatagttcaccagccagaagaactcaggttgcgtattggtgatggtcagcaccggtactttcatcggcaccttggtgccttcatccagcgctttgatatgcagcggtaaatagccaagccgatgcagagcgcgaataggctccaccccaaccgtatcgcgccccagatagccgtccatcacctgcttatactcgttcacgacctcctcttccgggcgggcgaaaaacgcgtcgttaaacagatcgaccaggaaccactgcagaaagccctgcaggccgaaaaataccagcttgccatcggcctgcggcgactggaaaaaacgatcgctgcgcggggtaaagttagagtagaccttcgttgtcccctgtggatactgcacgcgatgggaaactttataaccatcgatggccagaatcggatttattttcatcatgttatcccctatgtgcgcggtagatggcgtcaatatcgataagctccagctgcggatgagccagggcaggagaagtcaaagatgtggtggcgtaaacggcatcgatgccgttattcaacagatgctctacgcctttggaaaaaataccgtgggtgacgtacagactcacgctgcgggcgcccgcctcgcgcagcacctgcgccgagccgataaaggtgccgcctgcgtcgcagaggtcgtcaacaataagcaccgctttacccgcgacatcaccggccagcagggaaaaaccggttaacgcgccgctggcaaggtcacgctctttaccgaggatcgcgaactctccggcaccgcaggctttagccacaggatgaatcttctttagcgcgccggcatccggcgccaccagcatcagctccccggcagcaatagcctgacgcagaccggcgctctgcagaagacagtgctgttgagccaccgcgaccatattattgactgccgccgctgcggcatcgctgtgcgggtcaagcaccacgactttgtcaaagccaagagtattaagctgccgggcaaagaccttcagcgcaaagctgtctcccggcaccatatgacgatcctgacgcgcccacggcagccacggcagttccagatggctaaacgtcacgtcggtaacatgacgcacggcctccaccagctgcgccagtagcataaaatcgttcatgtcgcgcagagcaaccgcccggatgcgcatcagacgggcggaaggcggtagtggatcggtcaccttcagccacacagcgccatcgggaaagacgccgctggcaagcgtaaacgcttcatcatccagttccagggtaaatttttcgctcatgatgacctccgctcattacattgtgtccctaagacacaattaataatgtccctaagacacatattgtgcaagcgttaaatgtcatttaagcggagattttgactaatcaattgaaaaacaataataaaaatggaggcttgctgcacaggaaggggctggtacacttgtcagcgttcttttccgctgcgagcgctctatgaccaacgatgccgaatacctcagccaatacgatgccagccgctttccctcgccgctggtgaccgtcgacagcgtcctgtttaccctgcatgaaggggcgctgtgcgttctgctggttgagcgcgctaatccaccgcagcagggggcgtgggggctacccggcggctttatcgatctggcgcacgatgattcaacccgcgccacggcgctacgtaagctcacggaaaaaaccgggatttcaccgtcatggctggagcagctcgacaccttctccgggccggatcgcgatccgcgcggctggagcctgactatcgcctggtttgcgttaatctcgtgggtagagtgtcagccgcatatcgccagcgtcagcgatgcccgctgggtgccggtggcgcagctggatagctattcgctggctttcgatcatcaaaagattattgacgccggtctgcatcgcttacgccaaaaaacgatgtactctttactgccggtttactgtctgccggagacctttacccatggtcagctgctggaagccacggaaatcatccttggtcagccgattcaacgcaaaagcctgattcgccgcttcgaagcctccggaatgtttgaagagaccggtgaaacagcggcaaccggcgcgcggaaagcgcggctatggcggcgtaaacccggcgtcgattttcatctcttttcacgtaacctgctgaccgattagccgcaaggccacatatgggctaacctgcgcacttcatgcgcggtatagtatgttataaagattatttattgctctggtgctatggttgatatcactcctacagaaatgacgccccctgaagacgactcgcagcagtttcatccgatgcgcggcgtaggcaatcgtcatttgcaaaccatgttgccgcggctaatccgtcgcaaactccgctttactccccactggcagcgtctggaattgccggacggcgattttgtcgatctggcatggagtgaagacccttctcaggcgcgccataaacctcgtctggtggtatttcatggcctggaggggagcctacacagcccttacgcacacggacttatccatgcggcaatgcagcgcggctggctgggcgtggtaatgcactttcgcggctgtagcggcgaacccaaccggaataaccgcatctaccactcgggcgaaacggaagacggctcctggtttctgcgctggctccagcgcgagtacggcacggtccccaccgccgcggtgggatattcgctcgggggcaatatgctgggctgcctgctggcaaaagaaggcgacgctattcccgttgatgccgcggttatcgtatcggcgccgtttatgctggaagcctgtagctatcatatggacaaaggtttctcccgcgtttatcagcgctacctgctcaacctgctgaaagccaacgccgcgcgtaagctaaaagcctatcccggctctctgcccgtcgatttacgccagctaaaaagcatgcgccgtatccgcgagtttgacgattgcattacggccaggatccacggttttgccgatgcgctggactactatcgccagtgtagcgccatgccgcgcctgagcgatatcactaagcccacgctgattattcacgcgaaggacgatccctttatggatcaccactcgattcccccgcaggagcagctgccggcgaatgtcgaatatcagctcacggagcacggcgggcacgttggcttcgtcggcggcacgctgcgtaagcctgaaatgtggcttgaaaaacgcatcccggattggctaacccgttggctaggagcgcaaatatgatcattccctggcaagatctcgatcccgaaacgctggataacctgatcgaaagttttgtattacgtgaaggcaccgattatggtgaacatgaacgttcgctgacggataaagtcgcggatgttaaacagcagttgaaaagcggagaagccgtgctggtgtggtcagaactgcacgaaacggtgaacatcatgccccgcaagcagtttcacggctaaggcggcacacactatcgtttactctgggagttgttatgtctgccaaacatccggtgattgccgtcacgggctccagcggcgcgggaaccacgaccaccagcctcgcctttcgcaaaattttcgcccagcttaatctgcacgccgccgaagttgaaggcgatagctttcaccgctatacccgtccggaaatggacatggcgatccgtaaagcgcgcgatcagggcaaacatatcagctactttggccccgaggctaacgacttcggcctgctggaacacacgttcgccgaatatgggcaaagcggcaaaggccagtcgcgcaaatatttacatacctatgacgaggccgtgccgtggaatcaggttccggggaccttcacgccctggcagccgctgccggaaccgactgacgtcctgttttatgaaggcctgcacggcggcgtcgtgacgccgcagcataacgtagcaaaccatgtcgacctgctggtcggcgtggtgcccatcgtcaatcttgagtggatccagaagcttatccgcgacaccagcgagcgcggacactctcgtgaggcggtcatggattccgtggtccgctcgatggaagattacatcaactttatcaccccgcagttttcacgcacccacctcaactttcagcgcgtaccgacggtggatacgtccaacccgtttgcggccaaagccatcccttcactggatgaaagctttgtcgttatccatttccgtaatctaaaaaatatcgatttcccctggctcctggcgatgctgcagggctcgtttatttcgcatatgaataccctggtggtaccgggcgggaaaatggggctggcgatggaactgattatggcgccgctggttgaacggctgatggaaggccggaaaatcagcgagtagccagaaccccggtggcgcgattgccggccggggcgcgttcggcttacccttcgatcacttcataagagtgggtaatgtttaccgctttctcaagcatcagcgcgacggaacaatacttttccgccgacaggtcgaccgcgcgagacacggcagcgtccttcagttctttaccggtcacgataaaatgcagattgatatgggtaaacagacgcggcgcctcttcgcggcgctccgaggtcagcttaacttcgcagttggtgacgttctggcggcccttctgcaatatggaaaccacatcaatcgcgctgcatccgcctgccgccatcagtaccatttccattgggctgggcgctttatccccggaattgccgtccatcagaatctggtggccagaagccgactcaccgatgaaggttaacccttcaacccacttcactcgcgcttgcataaatttaactccagggctgtaattttcctgacagattacgcgtacataacaattctcgcaacggaaggcgacctgggtcatgctgaagcgagacaccaggagacatgcggcgaaagctatgctaaaacaatctggatgctacagtaatacattgatgtactgcatgtatgcagaggagttcacattacaggctgcagaaaactttcagccggattcccaggtatagggattcaatacgattgcatgcccggatgccgtgtagtgtcggcacccggagatagcttataacagaggataaccgcgcatggtgcttggcaaaccgcaaacagaccctacccttgaatggttcttgtctcattgccacattcataagtacccatcaaagagcacgctgatccaccagggtgagaaagcagaaacgttgtactacatcgttaaaggctccgtggctgtactcatcaaggatgaagaaggtaaagagatgatcctctcttaccttaatcagggcgatttcatcggtgaattaggcttgtttgaagaaggccaggagcgtagcgcttgggtacgtgcgaaaaccgcatgtgaagtggccgaaatctcctacaaaaagttccgtcagctgatccaggttaacccggacatcctgatgcgtctctcttcgcagatggctcgtcgtctgcaggtcacgtctgagaaagtcggcaacctcgccttccttgacgttaccggtcgtatcgctcagacgctgctgaacctggctaaacagccggatgcgatgacccacccggacggtatgcaaattaaaattacccgccaggaaattggtcagatcgtcggatgctcccgcgagaccgttggccgcatcctgaaaatgctggaagatcaaaacctgatctccgcgcacggtaaaactatcgtcgtctacggtacccgttaagtcggtaaaacggcgtattgcctgacaatacgccgtttttgttttcccctcatgtggcgcaggctgatttaccacccggaagtcaactatgcactgcggcaaacgctggtgttgtgtctgccggttgcgattgggcttctgctcggtcatctccagcaggggctgctgttttctcttgttcccgcctgctgcaacgttgccgggctggatacgccgcataaacgcttctttaaacgcctgattatcggcggcagcctgtttgccggctgtagcctgatcgttcagctccttctgcagcgagacatccctttgccgctgatcctcacgggtctggcgctcatcctcggcgtcaccgccgaaatcagctccctgcacgctcggctgctgcccgcctcgcttatcgcggctatttttaccctcagcctcgctggcaatatgcctatctgggagccgctgttaatctacgccatgggcaccttatggtatggcgtgtttaactggttctggttttggctgtggcgcgaacagccgctgcgcgaatcattaagcctgctctaccgggagctggccaactactgcgaggccaaatacagtctgcttacccagcatacggaccccgccacatcgctgccgccgctgctcaaccgccagcagaaggtggtggatctgattacccagtgctatcagcagatgcatatgctggcggctaaccagcgcagcgatcacaaacgcctgctgcgcgctttccaggttggactggaccttcaggaacatatttccgtcagtcttcatcagccggaagaggtgcagaaactggtggagcgcagccacgcggaagcggtgattcgctggaacgcgcaaaccgttgccgcccgcctgcgggagctggcggacgatctcctctaccaccgttatcctcagcgctttcagatggataaacagatcggcgcgctggaaaaaatcgcctggcagcatccggataatccggttggccagttctgcgcctggcacttcagccgcattgccagggttctgcgcacccagcgcccgctatacgcgcgtaacctgatggcggataaaacccgccgcctgccgctgctgcccgcgttgaaaaactatctgtcgcttaagtcgccggcgttacgaaacgcggcgcgtatcagcgtgatgctgagcgtcgccagcctgatgggcagcgcgctgcatctgcctaagccctactggatcctgatgaccgtgctgttcgtgacgcaaaacggctacggcgcaacccgggtacgtatcgtccatcgggctgccggaaccattgcgggactggtcattgccgggctcacgctgcactttcacgttcctgaaggctatacgctgaccgcgatgctgttcatcacgctgttaagctatctgattatccgcaagcactacggctgggcgatggtcgggtttacggtgacggcggtgtacactctgcagctgctcactctgaacggcgagcagtttatcatcgccagactgattgatacgctgattggctgtctgatcgccttcggcggaatggtctggctatggccgcagtggcaaagcgggctgctgcgcaaaaatgcccacgatgcgctggaagccgatcaggaagcgatcaggctgatcctcagcgacgatcatcaggccccggcgctggcctaccagcgcatgcgcgttaatcaggcgcataacgcgctgtttaactcgctgaatcaggcgatgcaggaacccggctttaactcgcactatctggaagacatgaagctgtgggtgacccacagccagtttattgtcgagcatattaacgcgatgaccactctggcgcgcgagcacaatatgctgacgccggatctggcacagcgttatctggaatcctgcgagattgcgctccagcgctgccagcagcggctggattccgacgggccgggcagcgcgggggatgtgaacattatggaggcgcatgatgcggaggttcctcgcggcccgctcagtacgatggagcagcatttgcagcgcatcctcgggcatctgaacaccatgcacaccatttcatcggtggcatggcgtcagcgtccgcatcatggcatctggctgcgcgccactaagcgctaagcacccgctcaaccgccagggcaaagcacgccatgccttcagcaatatcgctatcatcaatcaccagcgacggtacgaagcgcatcacgtccggtccggcattgagcaccatgacgcccgcctctgcggcggcgtagaggaaatcgcgcgccttcccgtgatactgcggcttcagctcggcgccgataagcaaacccatgccgcgaatatcgctgaacagatcgaaccgcgcgtcaatgcgctgaaggtgctcaacaaacagctcgcgcttcgcggtgacgccgtccagcacttccggcgtgttaatcagatcgaaggccgctccgccgaccgcgcaggccagggggttaccgccgtaggttgagccgtgagaaccggcgtggaaagcgctggcgatatcatgggtggtcagcatcgcgctgatagggaagccgccgccaagcgccttggcgctggtcagaatatccggcgtcacgccgtagtgcatataggcaaacagcgagcctgtgcgccccataccgcactgtacttcatcaaacaccagcagtgcctggtgctggtcgcagagatcgcgcaatccttgcaggaattccggcgtcgccgccgtcactccgccttcaccctgaatcggctcgaccaccaccgcgcaggtatgatcgtccatcacggctttcaccgcgtgtaaatcgttaaacggcacgtgaacgatatcggccggtttcggcccaaacccgtcggaatatttcggctgaccgccgacggagacggtgaaaagcgagcgaccgtgaaacgcattatggaaagcgatgattttggttttgtacgggctatggcgggtcacggtgtaatggcgagccagcttgaaagccgtttcgttagcttccgtaccggagttcataaacacgacgcgatcggcaaaagtcgcatccaccagcttccgcccgagtcgcagggcgggttcgttggtaaaaacgttgctggtatgccacagcttttcaccctgctcatgcagtgccgccaccagcgccggatggcaatgaccgagcgcggtcacggcaatcccaccggcgaaatcaacgtactctttaccctgctgatcccatacccggcttcccttacccttcaccggaataaattctgccggtgcataaatcggcaaaatgacctcatcgaatgtagcgcgggtgattgccggttgttcagttgccatgtggtgcccatcctttacgttatgcagcaatgattatgataatctaatcacaaaatatgcataaaaaatcaactcatggcaactacaaatcaccgattgaggaagtttgccagcagctggtggccctgctcgctgagaatactctccggatgaaactgcacgccctcgagatcgaacacgcggtggcgaatgcccatgatctccccctcttcgctgcgggcggtcacctcaaagcattcaggcagcgttagcggatcaatgagcagggagtggtagcgggtcaccgtaagcgggttattcagtccaaggaacaccccttgaccggtatggctaacgggggacgtttttccgtgcatgactttggcggctcgtacgatagcggcgccgaaaacctgggcgatggcctgatggccgaggcaaacgcctaagatcggcgtttggccggaaaaatggcggatcgccgccagtgaaatccccgactcatccggcgtacaggggcccggcgagataactattttcgctggcgccagggaaataatgtccgctaacgtcagctcgtcgttacgcctgaccagcacttccgccccaagttcgcagaaatactggtacaaattccaggtgaaagaatcgtagttatcgataagcaggatcatagcggctccgggaacaaagaaccgcgctattctactcagtttccgtcgcttcgcttaccactttgcgaaatatcgtccgcagtggagaaaggtcgcccatcgctccgctctggttggcctggttccacgcatcgaccgcaatatcgcgccaatccagcgtatagcccgcatggatagccagctgctcaaagaaaatgcgttgcgccaagccgttaccgagacggaaaggatgcaggacgttaatttcgcagtagtaatgagcaagacgttcaatgaatttatcctgcgcgagacccaccagataaccttcctcttcaagatcctgaagcagcgcgttcccctctttttcgatataggcgaaatggcagaaacgggtgtcgccctgatagatatccacttcacgcagctgccccgcccagtcgaagacatcctgatagagctggcgatgaatagcgcagagatgaggcaatccccgcaccaacggcccgagttcaatggttgccgcgcgtaatgcggtcagctcccacgccgcctgctcaagtcgctgagcctggcgaatccccaggcggttgcgcatcaccttaagaccggggtagagataggggtcccgcccctcgccgaatttatcgctcatagtgactccttaacgccgcaatgcgcgccagggcttcttcgggggtaagggttatcagcggaacatcgacgccctccagccgtcggctggcctgaaaattcacgttacgtcgatcctcccagagacgggatttctgtttttcggtgagctttttcatttaacacctccctgacgcgtccgcagttgccacaagtataagcggcaaaaaacgatttcgcagggaagcgggggctgcgcgggtacgggttacccgcgcaaaataagattacggcagaacttttgcggaaaggatcacgataggtttggacggtacattctgatacgggccaacgttatgggtcggcacctgagaaatcttatccgccacgtccatacctttaacgactttaccaaacaccgcatagccaaaatcacgctggccatgatcgaggaaggcgttatccgcaatattgataaagaactggctggtggcgctgtcctgatcggcggtacgcgccatggcgatggtgccacgcgtattgcgcaggccgttgtcggcttcgtttttaatcggtggattaggctgtttctgctgcatctgctcgttaaagccgccgccctgcaccataaagcccgggatcacgcggtgaaaagtggtgttgttataaaagccgctgttcacgtacttgaggaagttatccaccgagatcggtgctttctggctattcagctcaagctcaatattgcccgcagacgtggtcagcaacacatggggatccccttttgccgccatggccggggagaatgctgaaatggcgaaaacggcagccaccgccgcgagagttgatttgagcatggaaattccttaacggagcagaataaaaaccgagtgctttgattctaaagagcctttgcatcctgggccagccttttacctaattttacttagctgaaacagttgtaacggtgggcctggcgatcggctaaatagataaatgtgatattagtcacactaagaattgcaaaaagatataaatttcagaataaacgtttgcttgaatcacgctaacgcataaaatctgtccgcccggcgcagagtcaacgcgctttacatttctattcacaggccagtcatgactaacagcaatcgtatcaagctcacatggatcagcttcttctcctacgccctgaccggcgcgttggtgattgtcaccgggatggtgatgggaaatatcgcagattattttcatctgcccgtttccagtatgagcaacacctttactttccttaatgccggtatcctgatctctatcttcctgaacgcctggctgatggaaattgttccgctgaaaacccagctgcgttttggctttatcctgatggttctggccgtcgcgggtttaatgttcagccacagcctggcgctgttttccgcttcgatgttcgtgcttggcctggtcagcgggattaccatgtcgattggtaccttcctgatcacccatatgtatgaaggccgtcagcgcggggcgcgtctgctgttcaccgactccttcttcagcatggcggggatgatcttcccgatgctggccgcttatctgctggcgcgcagcatcgaatggtactgggtttatgcctgcatcggcctggtgtacgtcgctattttcattctgaccttcggctgcgaattcccggtattgggcaaaaaagccctgcaggatagccagccggtcgtgaaagaaaaatggggtatcggcgtgctgtttctctccatcgctgcgctatgctacatcctcggccagttgggtttcatctcctgggtaccggaatacgccaaaggcctgggcatgagtcttggcgatgcgggtaaactggtaagcgatttctggatgtcgtacatgatcggcatgtggtctttcagcttcatcctgcgcttcttcgacctgcagcgtattctgaccgtgctggcgggcgtagcgacggtactgatgtatctgtttatcaacggttcgccggagcatatgccgtggtttattctgaccctcggcttcttctccagcgccatctatacgtcgatcatcaccctgggttcacagcaaacccgagtgtcgtcgccgaagctggtgaacttcattctgacctgcggaaccgtgggtactatgctgactttcgtcgtgaccggccctatcgttgccgccagcggtccgctggcagcgctgcataccgctaacggcctctatgccgtggtgtttgtgatgtgtctgatcctcggcttcgtctcccgccaccgtcagaacaacgcggcagcggaatcgcactaagcctcaggcccctttgttccggcaaaggggctatttcgggtaaagaacagctcctcaccgccccgatccatctgaacccaggtttgcgccagctgcgtggtggcgatgactctcccctggcggattgaccaacgcaccggaacctgacaacgcacggcctcaaacccgttttccgcgggcagaatcaccagattcgccgtgttccccgtcgcaataccgtaatcgctcaggccaaacgtgcgcgcgctattttccgtgaccagcttcagtccctcgttaatctgctgatagcccatcatctggcaaacgtgcagacccatgtgcagcacctgcagcatattgccggtccccagcggataccaggggtcaaatacatcgtcatggccaaagcagacgttaatgcccgccgccatcagctccttcacgcgcgtgataccgcgacgcttcggatagtcgtcaaagcgtccctggaggtgaatattgaccagcgggttagcgacgaagttaatgccggagagcttcagcaaacgaaaaagacgtgacgtataggcgccattgtaggagtgcatcgcggtggtatggctggcggttacttgcggacctatcccctcttttaacgccagggccgccacggtttcaacgaaccgcgactgttcatcatcaatttcatcgcagtggatatccagaggccgctgatactttttcgccagacggaaagcgatgtgcagggattccacgccatattcgcgcgtaaattcaaaatgcggaatcgcgcccaccacgtcggcccccagacgcagcgcctcttccagcagggcctcaccattggggtaggataaaatgccctcctgggggaaggcgacaatctgcagctctacccacggcgcgacctcctgctttacctccagcatggctttgagcgcggtcagcgtcggatcggaaacatcaacgtgggtacgaacaaactggatgccgttggcgatctgccacttcagcgtcttccacgcgcgggctttaacgtcctcatggctcaataaagccttacgctccgcccaacgctcaatcccttcaaacagcgtcccggactggttccagttcggctctccggcggtttgggtcgtatcaaggtggatatgcggctcaataaaaggggggatggccagtccgccgcgggcgttcagcacttcaaaattctctttgcgcgcctcccccataggggtgatatccccgaagcgccccttgtctatcgctatctgccataacccttcgcgatcgggcagacgaacgttctcaattaaccaaagcggcgctgctgtcatatcgatgactcccgtaattgttgctgaagttttactcaacccgccgtgggtatccgttgctaattttgtacataaaaaaagcaaaaaggaaaagccagcgttttccgttacttataaaaatactgacaaatcataaacataccacttaagtagtaggtaaaggtgtaattgatttgcatcaataagtgtcgcggctgaatcgttaaggtaggcggtaatataaaagaaatcgaggcaaaaatgagcaaagtcagactcgctatcattggtaatggtatggtcggccaccgctttattgaggaccttcttgataaatccgacgccagcctgttcgatattaccgtcttctgtgaagaaccccgtatcgcctacgaccgcgtgcacctctcctcctacttctctcaccataccgccgaagaactctctttggtacgggaaggtttctacgagaagcacggcgttaaggtgctggtcggcgaacgcgccatcaccatcaaccgccaggagaaggttatccactccagcgcgggccgtaccgttttctatgacaagctgattatggcgaccggttcctatccgtggatcccgccgattaaaggttctgaaacccaggactgctttgtttatcgtaccattgaagaccttaacgcgattgaagcctgcgcccgccgcagcaaacgcggcgcggtcgtcggcggaggtttgttaggcctcgaagccgcgggcgcgctgaaaaacctcggcgttgagacccacgtgattgaattcgcgcccatgctgatggcggaacagctggatcagatgggtggcgaacagctacgtcgcaagattgaaagcatgggcgtgcgcgtgcacaccagtaaaaacaccaaagagatcgttcaggaaggtaccgaagcgcgtaaaaccatgcgttttgccgacggcagcgagctggaagtcgactttatcgtcttctctaccggtatccgcccgcgcgataagctggccacccagtgcggtctggaagtcgctccgcgcggcggcatcgtgattaacgacgcctgccagacctctgacccggatatctacgccatcggtgaatgcgccagctggaacaaccgcgtttacggcctggtcgccccgggctacaaaatggctcaggttaccgttgaccatatcctccagaccgaaaacgcctttgaaggcgcggatcttagcgccaagctgaagctgctgggcgttgacgtcggcggcattggcgacgctcacggtcgtacgccgggcgcgcgcagctacgtttacctcgacgaaagcaaagaggtctacaaacgccttatcgtcagccctgacaacaagaccctgctcggcgcggtgctggtgggcgataccagcgattacggcaacctgctgcagctggtgctgaacgccatcgaactgccggaaaaccccgactcgctgatcctgccggcgcacgcgggcagcggtaagccgtccatcggcgtcgataaactgccggacagcgcgcaaatttgttcctgcttcgatgtcaccaagggcgcattgattgccgccattaataaaggctgccacacggtggcggcgctgaaggcagaaaccaaagccggtaccggctgcggcggctgtatcccgctggtgactcaggtgctcaacgccgaactggcgaaacagggcatcgaagtcaacaataacctgtgcgagcactttgcgtactcccgtcaggaactgttccacctcatccgggtggaaggcatcaaaacctttgaagagctgctggcgaaacacggtaaaggctacggctgcgaagtgtgtaaaccgaccgtgggctctctgctggcttcctgctggaacgaatatatcctcaagccgcagcataccccgctgcaggataccaacgacaacttcctggccaacatccagaaagacggcacctactccgttatcccgcgctctgcgggcggcgaaatcacgccggaaggcctggtggccgtcggccgtatcgcccgcgaatttaatctgtacaccaagatcaccggctctcagcgtatcggcctgttcggcgcgcaaaaagacgatctgccggaaatctggcgtcagctgatcgacgcgggcttcgaaaccggtcacgcgtatgccaaggcgctgcggatggcgaaaacctgcgtaggcagcacctggtgccgctacggcgtaggcgacagcgtgggtttcggcgtcgagctggaaaaccgctacaaaggcattcgtacgccgcataaaatgaagtttggcgtctccggctgtacccgtgaatgtgcggaagcccagggtaaagacgtcggcatcatcgccacggagaaaggctggaacctttacgtctgcggcaacggcggcatgaagccgcgccacgcggatctgctggcagcggatcttgaccgcgaaacgctgatgaaatacctcgaccgcttcatgatgttctatatccgtaccgccgacaaactgacccgtaccgcgccgtggctggacaacctggaaggcggcatcgattatctgaagtcggtcatcatcgacgacaagctgggactgaacgagcatctggaagaagagatggctcgcctgcgtgcagcggtagtctgcgagtggacggaaaccgttaactcgccagcggcccaggtacgcttcaaacactttatcaacagcgacaagcgcgaccctaacgtccaggtagtgcctgagcgtgaacaacatcgcccggccacgccgtacgaacgtatcccggtaactctggtggaggaaaacgcatgagccagtggaaaaacatctgcaaactcgatgacatcctgccggaaaccggcgtctgcgcgctgttaggcgacaaacaggtggcgattttccgcccgtatcacggcgaccaggtgtttgcgattagcaatatcgacccgttctttgaatccagcgtcctgtctcgcggcctgatcgccgagcatcagggcgagctgtgggttgccagtccgctgaaaaagcagcgcttccgcctgcgcgacggcctgtgtatggaagatgaaagccattcggtggcgcactatgaagcccgagtgaaagacggcgtcgtgcagctacgcagttaatcactttacgggaggcgcaacgcctccctttttttgcatttttttcttcaatttatggcacaacatcatttgtactgcatcgcgaaggcagctaaccaagagccagcgcaagggatgaggtgctaaaggaactcctatgtttacggacacaataaacaagtgcgcggccaacgccgggcgcattgcgcgcctctcggccaatcatccactcagcttctgggtcagcgccatgatggcgggcgcctacgtcggcctcggcatcatccttatattcaccctcggcaacctgctcgaccctgccgttcgcccgctggtgatgggcgccacctttggcattgcgttaacgctggtgattatcgccggctctgaattgttcaccggccacaccatgttcctgaccctgggcgtgaaggcggggaccatcagccaggggcagatgtgggcgattctgccgcaaacctggatgggtaaccttgcgggttccgttttcgtggcgctgctgtatagctggggcggcggcagcctgctgccggtcgataccagcctcgtccacaccgtcgcgctggcaaaaaccagccaatccgcgatggcgctctttttcaaaggcgcactgtgtaactggctggtgtgtctggcgatctggatggcaatccgtaccgaaggcgcggcaaaatttattgctatctggtggtgtctgctggcgtttatcgcgtccggctatgagcactccgtcgccaacatgacgctgtttgccctctcctggtttggccatcatagcgatgcctacaggcttgcgggaatcggtcacaatctgttatgggtaacactcggcaatactttgtccggtgtcgtatttatgggattgggttattggtatgctacgccgcaatcggagcgccccgccccggaaaaaactaacgagactaagagtctggctcagtagacctaatcggtgcaggcaggttgaacattgcccaggttcaacctgataaataagatagcctgatagccagattctaaggctgctgccaataattaagagggaatgtcgtggaccatttgcctatattttgccaattacgcgatcgcgactgcctgttagtcggcggcggcgatgtggctgaacgtaaagctcgcctgttactggacgccggcgccagattaacggtcaatgccctggattttgtgccgcaattccaggtatgggccgatgcaaacatgctgaccctggtgcagggcgagtttaatcctgctctgctggataactgctggctggccattgccgcaaccgacaacgaagcggttaatcaacgggtcagcgcgtcagcggaagaaaggcgaatattttgtaacgtggtcgacgcccctcagcaggccagctttattatgccgtcgattatcgaccgctcgccgctgatggtggccgtctcatccggcggcacctcgccggttctggcgcgcctgctgcgcgaaaagctggagtcagttttaccgctgcatttaggccagctggcccactacgctggtcagctgcgctcacgggtgaaaaaacagtttgccaccgtcggcgagcgccgacgcttttgggagaaactgtttgttaacgacaggctggcgcagtcgctggccaacgaggaccgccaggccgtcgctgacgccacggagcagctgctgaccgagccgctggatcatcgcggtgaagtggtactggtgggcgccggccccggcgacgccggactgctgaccctcaaaggcctgcagcaaatacagcaggccgatgtcgtggtttatgaccgcctggtctccgacgatatcatgaatctggtgcgccgcgatgccgaccgggtcttcgtgggtaaacgctcaggctaccactgcgtaccgcaggaagagattaaccagattctgctgcgcgaagcccagggggggaaacgcgttgtacgactgaaaggcggcgatccgtttatctttggccgcggcggcgaagagctggaaaccttgtgccatgccggtattccgttctccgttgtaccgggaattaccgcggcctcaggctgttccgcctactcgggcattcccctgacccaccgggattttgcccagggcgtgcgcctggtcaccggccaccttaagaccggcggcgagctggactgggaaaacctggcggttgaaaagcaaaccctggtgttttatatgggcctgaaccaggccccggcgatccgggaaaaactgattgcccacggcatggcggcggatatgcccgcagccatcgttgaaaacggaacggcgataacgcagaaggttgtcaccggcacgttagagcaattggatattctggcccagcaaatggccagcccggcgctgattattgtcggccgcgtggtcggcctgcgcgataagctgaactggttctccaaccattaatgacgctgatgtagctcaaagccgctcgcaaattaaaaagccggatacattgcacccggctttttattgcgctgagaccagcaaattgctcagggcttagcgacgaaaccaatcgcttcgtaaaccgctttcagggtaacggaagcgcgagcgctggctttctccgccccctccttcatgacctgattgaggaatgcttcatcaccgcggaatcggtgatagcgctcctgcagttcggtcagcatgccggaaacggcttcagccacttcgcccttcaggtgaccgtacattttgccttcaaaatgctgctccagctctggaatgctctgaccggtaacggcagagaggatatccagcaggttggagacgcccgctttgttctggatgtcgtagcgaacaaccggcggctcgtcggagtcggtgaccgcgcgtttgatcttcttcaccaccgatttcgggtcttccagcaggccgataacgttgttgcggttatcatctgacttggacatctttttggtcggctccagcagcgacatcacgcgcgcgccggattttggaataaacggttccggcactttaaacacgtcgccgtagatagcgttgaaacgctgggcgacatcgcggctcagctccaggtgctgtttctggtcttcgccaaccgggacctggttagtctgatacagcagaatgtcggcagccatcagtaccggatagtcaaacagaccggcgttaatgttttccgcatagcgcgatgacttgtctttaaactgggtcatacggctcagttcgccgaaataggtgtagcagttcagcgcccagccgagctgcgcgtgctccggcacgtgggactgaacgaagatggtgcttttttgcgggtcgataccgcacgccagatacagcgccagcgtgtccagcgtggccttacgcagctgctgcgggtcctgacgaacggtaatcgcgtgctggtcaacgatgcagtaaatgcagtggtaatcgtcctgcatgtttacccactgacgcagcgcacccatatagttgccaatggtcaattcaccggagggctgtgcgccactaaaaacgatgggcttagtcattttttattcctgagtttcactgtacggtagcccgaaagcgggcaagagttcattaaattggtcaaagatataatccggctcgctcagcgaaatcggctcgccgtagttgtagccgtaggtcaggccgatcgaactgcagcccgcggccttcgcggcctgaatatcgttgcgcgagtcgccaacgaacagcagctccgcgggtgccagccccagtttctccgcgaccagaagcagcggttccgggtgcggttttttgtttttacatcatcgccgccgataacaacggtaaaatatttcgcgatatccagcgacgccagaatcggcgcgacaaagggcgtcggtttattggttaccagcgccagcggcaggccctttgcgtgcagcgcgcccagcgtatcggcaacggcgggaaacaaaaagctcccctcttccgccacttcgccatagtagcgatcgaacagcttgcgcaaaatggcctgctgttcagcctgcgggatatcgtcatgatcgacggaaggtttaccctgcgccgctctcagcgccgcgcgctcctgacgggcccaggtcagagcccgctggatcagaacgtcagcgccgttgccaatccaggtcacgacgcgctcttcgcccgccatcggcagttccagcgcataaagggcgttatcaacggcagcggtcaatcccggcgcgctgtctaccagcgtcccgtcgagatcgaacgccacgccgcgaatattttgtaacttatccatggctaacctttgctaattcgctacgcatttgatcgaccacttttttgtagtcaggctgatcgaaaatagccgatccggcaacaaacatatccgcaccggctgcggcaatctcagcgatattgctgacttttacgccgccgtcgacttccagacggatgtcgtagccggattcatcaatgcgacgacgaacttcacgcagtttttccagggtgtgcggaataaaagactgaccgccaaagcctgggttgacggacatcagcaggatgacatccagcttatccatcacgtagtcgaggtagctcagggaggtggccgggttaaacaccagaccggctttacagccatgctctttgataagctgcagcgtgcggtcaacgtgttcagaagcttccgggtggaaagtaatgatgctggcgcccgcggcggcaaaatcaggaacgatgcggtcaacgggcttgaccatcaaatgcacatcaatcggcgcggtgataccgtaatttcgcagtgatttaagcaccatcggaccaatggtcagattcggcacgtagtggttgtccatcacgtcaaagtgcacaacatccgcacccgcagccaacgcattggcggtatcctcgcccagacgggcaaaatcagccgacagaatcgaaggggcaatcaaatactgcttcatccgcatctccttgaaatttatttggtcttgggcggacggtacagagccagaagctcgtccaccttcttacgtgtaccaccgttgctgctgatgctgcgtcgaaccttcacaatatgcgtctcagcggcgtttttgtaccactcctcagtgagcggcgtgcgatggtttgaaatcagcactggaatgcgctttttcatcagcgattccgcctttttagccagcagctcctgctgctcctggctaaagctattcgtatgataagccgtaaaattcgccgttgatgacagcggcgcatagggcggatcgcagtaaacaacggagcggttatctgcccgcttcatgcactcttcataagattcacaatgaaactctgcatgctgcgccttctccgcgaaatgatacagctcagcttcgggaaaatagggcttcttatagcgaccaaacggcacgttaaactcaccgcgcagattgtagcgacacaggccattgtagccatgacgattcagatacaggaacagcaccgcgcgacgcagcggctcctggctctggttgaactcatcacggaaccgataatactgctctgtgacgttgttctctggcgtaaacatctcacgcgccgccgtaacatagtcatcggtacgcagcttgacgatgttatacagactaatcaaatcactattgatatcagcgaggatataacgagaaaagtcggtattcagaaataccgacccggcgcccacaaaaggctcaatcaagcagtcgccctgcggcaaatgcttcttaatatcgtcaagcagggggtatttaccccctgcccatttcagaaaagcgcgattctttttcatgctgcctaactaattacacattctccggctgtggagaaagctccgacagcatcctgcgcttcagactacactgcggcattatttcaggtcagactgaacctgatgcagcggttttgcccacggattttttgcctgtacatctgctggcagcgtagcaacagcacgtttcgcttcatctttcgaagcgtagatgccgctcaccaggacataccagggctgtccgttacgcgtagtctcatagacaacatacttttccagcttctctttcttcgcccaactgttgaggttgttgtagttagaagagctgctgagctgcagcgtgtagtgaccggacggcgcagacttcatcgaactgacgtcacccgcacttttacccgcagcggccgtagcagccggagcggcagcggcagttgctgctggcgcggtggtcgcggtcgcagcaggcgcggtagtcgcggctggtttggcctgggcagttgcggcaggcttagtcggctgcgcggctgccggcttcgtggtcgcgacgttttcgacacgcttaggctggaccgctgccggcttcggctgggtcggtgctttcgccgtggcctgcggtttcggttcgataaccgtatgcttacgctccgccggacgcggtgtcgccgccgtctgacgctctgtcgtcgcctggcgcggggccgcggtgccattgcgcactggcgcaacggtggcaggttcagttggcagagtagaattcgcgaccgcgctatcaatctgaccctgctgctgggtcagcgcattgttcagatcgccctgaacctcaacgcgctgctggccttggggttcagccgtcgcctgaccttgagtcgggttagacgcgataggcggcagagaaacatcctgcggctgcgcgttgtttgccgctgatgaatcctgagcagcaggctgggtattattattgtcctgctcgccggacaggttgatgctcttctcgccggaagccgtttgctcgctggatgaggatggtgatttcagcgcggaacccacgccaacgatcagcagcagcagaacgaggatccccacgcccatcatgatgtactgacgggaagccggtttcgcaggcgccttcttacgcttacgaggacggcgctcaacctgacgctcttcgtcatcgtcttcgtcagactctacttcttcttcgtactcttcatactgttcttcatcgcgctcacggcgtgctttgctgccgcgcgtcgggcgaccatcgtcagcatcatcaagttcgacatcatcaaaattgatttgcggatcggcatcacgctctgaagactgacgagaacgaccagtacgacgatcgctgcgatcggctttcatatcgtcttctggttttaattcatccatttaacaccccactaaaaggcttatgctcacgactattgcacgtcacccgaaatgataacgccgcgcgaacgcggccagaccttcttattgttgcgcctgctgagtatcagcaatcgcgccaagaacaacatcatgcgggactccgccgcgtatctcgctcttccctatcgcgaggggtagcaccagccgcatctcgcccgccagcacctttttatcacgcatcatatggggcaaatacgcctctgctgccatctcctgcgggccacttaccggcaagccagcacgctgcagcagatgaataatgcgctgcgtatcctgcggattaaaccgccccagacgttcggatgcacgcgccgccatcaccataccggcagcgaccgcttcaccatgtaaccagttaccgtagcccatctcagcttcgatagcatgaccaaaagtatggccaagattgagtaaagcacgtaacccggtttcgcgctcgtcggcggcgacaacttcagctttcagctcacagcagcgacggatacagtacgccatcgctttttcatccagcgccagcaatgcatcaatattattttccagccagtcgaaaaattcgccgtcaagaataacgccgtacttgatcacttcagccaggccggaagagagctcacgcttcggcagcgttttgagacagttaagatcgacaacaacagaaaccggctgccagaaggcgccaatcatgtttttgccgagaggatggttgacggccgttttgccgccgaccgaagaatccacctgcgacagcagagtggtaggaacctgaataaagcgcacgccacgctggtagctggccgctgcaaatcccgttaaatcaccaatcaccccaccgccgagcgccactaacgtcgtgtcgcggccgtgtggtttttgcaatagcgcggtaaaaacggtatccatcaccgccaggcttttaaactgctcgccgtcgggaagaatcacgctatcgacttttacgcccgcttgctcaagtacggagcgtacggtatccagataaagcggcgccagcgtttcattggtgaccagcatgacctggtcgcctgatttcagtggcaggaaggaagctggatcgttaaacaaaccagccgcgatggtaatcgggtaactacgttccccgagggttacagtaagcctctccataacgcgacgtccacctcagttgcttttactctgacgcactttattaagccagaatcagttgctttccagcatatgaataatctggtttgctaccactttcgcgctttgatcgtcagtgcggatagtgacatctgcaatctcttcgtacagcggattgcgttcatccgccagcgcttccagtacttcgcgaggcggagcatcaacctgcagcaaaggacgctttttatcgcgctgcgtacgggcaagctgcttttcgatagttgtttccaggtagaccaccacgccgcgggcggagagacggttacgcgtttcacgggattttacagagccaccgccggttgccagcacgattccctgtttttccgtcaactcattgatgattttttcttcacggtcgcggaagccgtcttcgccttctacatcaaagacccaacccacatctgcgccagtgcgtttctcaatttcttgatcggaatcgtaaaattccatgttgagctgttgggctaactggcgcccaatagtgcttttgccggcacccataggcccaaccagaaagatattgcgtttctctgccattttttcggtactactaagactattcgttaatggtaaacccgcttcgcagacacccagcgcagcaggacatgaactgaaacctcatatgcaattagagcgagagtcagactaaaaattatctcaatactccggctggtttggcaacagaataaatcaccggacaagaaagggaggattgatgtcgtacccgactctcaaatcggtaccccttgtatgctaaatccgtcctcacgtcaaacacctgaaacgtgtttagcatgaaaaacccgcttaatgcactgccagaatacgtggagtgatgaagacaaccagttcacgtcgttcgttatccttaccgtcacggcgaaataactgaccaagccaggggatgtcgctaaggagaggaataccatcgcgagacgttttatttttctgcgcaaagatcccgcctaacgccagggtctcgccgcttttcatttcaacctgcgtttctatttcttgtttatcgatagccagcgcttcaccattttcctgtttgagcacctggcccggcgtattttcgctaatcctgagttttaaacgcacgcgatcgtgatgcagcaccgtcggcgtcacctccatccccagcaccgcctctttaaactcaacggaggtcgccccgctttcgccgctggagacctgataaggtatctcgctgccctgcttaatgctggcgggctgcatatgggaagccaacagccgagggctggcgataatgtccacctgctgcttctgctcaagcgcggaaagttccagctccagaagccgcccgctgatgcggccgatgttaaacccggccctcgtgctggcatcccctaccgccaggttgctgctcaaggtggttaatttaccggagcccggcgggctgctggcgtcggccaggctccacttaacgcccagttcgcgcaggctggtttcgctcattgagacgatgtgcgccgccagctcaacctggccgacgggcacatccatctcccgggcccacgcttttaacgccgggaggtgccgggcatcatcacgaatcaacaggcggttggttcgcttatcgaccatcatatgcccgcgagcgctcagcagtttttcacccgccttcgctaaatcttctgcatccgcataatgcaaggtcacgctatacccctgcaaaggaagattctgcagacgctttgctttttccgcttccagcagcagctgctgcgccttttgccacgcctgagtgtgcacgtacaggaccgaaccttgctgagtcagggccagaccggcgctgtcgataaccgagcgcagcgcctgtaaccagggcacctccttcagatgaagagataccgtaccgctgacgtcaggagccaccacgagatttttttgcttcagctccgccagcgtttgcagtacctgggacaccggcgcatcatcgacgaccagcgacacgggaagatcctttttggccgcgacgaccatcagcggcaggagcagaaacagcaggcttgtccatcgcatcattctttattccctttcgcagccagacccactgtgcgggttcacacccaggaccggttgatattgtcatttcctctggcgtcaggcgcgtcacccgccagcccgtgggcaaaatagcctccgccctcacgcggcgccatttcccggcgctatcctgcacgatacccataagcgccagcgaatcgccgatagcaccgccgtagcgccactggctaagctgcgccgtccggcagcggtccaccgggggctggaacggatcgcgctcttcagccagcagcgggagcgggaacagcagccaacaccaccatttaaggcgcatcttccgcctccagatgcagggtcaaccgtaacgcctgcttttccggctgcagggagaaagccgtagcgcgcatcccgcagcgagccagccaggaaaagagcgcgggcaccgcttgccagtcaaccgccagctgcatctcgcctgcggagccccctggccgccaggcgataagcgtcgccccggcaataggaagatcaataggcgtaaaaacctgggtcgcgtcttccgccatcccggcggtctgtaaagcgctactcagcggcagcagttttcgccactgcgcctgtacctgcggcgagcgcccggccgacgtttctgcctggagaggcagcagtagccagaacccgattacggcgatgaggaccagagcgacggatatcatgaacagatatttgcgccccgtcagccaacgttcaacgtcccactgcattgtcgtcctcttcggccatggaaaagtgaaataaccagcgcccttcgctgtcgcggtgcgtttctcccgcctttggcggacgcaggccggcaacgctccccagcgccttttcaagctcagccagcccctttagatgcaacgtgagtccgctcagtaccagggtattctgtcggtattccagcagcgttaaccaggcgtgctccggcatacgcgacgctatcgcctgtaacgttggctgccaggcggcggttctctcgcgccgcagatagcgcaggcgccgttgttcctgctgctgcaggcgctggcgcatggcgcgttcacgctgctgtaatgcgctataaagcaggtcgtcagcgcttatcctcgccgtttcaagcgagtggctggcccgtttgttgagccgtgaggcgaggatcgccgcaagcagaataagtagcaaacccacaatcagcagtcctgccatccgcagacgttgccgtcgacgcgtttcgcgccagggaaggaagttaacgatgtggctcatggctgacccgctcccagcgccaggccgagggcaacggtaaagctatcgccacgggccgggagcgggggctgcaggcgatgaatggcgctccatgcgtcaaaattctgcccgtcgagcgaggcagaggtgcaaaggcgaaactctccggcgttcacccgggaaaccaggccgggaaaagagggaacgtcgctgcacggacagcatccccagctatcggcggtcgcccaaagccagctcgtttcgtcacgccacgccagcccctgaacctcgacgggcagccaggggaaaaaggcgccaagcgcgctggcgtccggcacaattccgaccaccttcagcttaaggcggcttgccagctggccgagggcgttaatatccaggcgctgcgcggcggtgacccgccagccatcggccgctctggcgtccacataatcgacgcagagcgatgacgcgggcatttccagctgctgcgccatcgcgctggcgatccaggtcgcctgctcgctttctcgtaatgaaatctgcgggcgcggaagctgcttttgcagcgttcgcgccgccgggaaggcaatacacgcctgatgctgcaaaggcagctcccgccgccagggctgcagctggcgggccagcgactcaacgtccaccacgatgccctgccgcacggtgccgggaatcagcgggatacgccaccagcgacgtagcgcccagcgtgaacgctcgagtaataacgcgacgatagcaatatggtcctgctgaatatgcattcctatgcgccagtttctaaaagccatgcctacgatctccttatccgccgatatgcttcgctatatcaatgctccaggcttgcctttatactactgcgcgtttgtttataaactgcccaatgaaaactaaatgagaaatctccggtgaagttcgtaaagtatctttttatccttgcagtctgttgcgtactgctgggagcaggctcgatttttggtctctataaatatatagagccgcagctccccgacgtcgcaaccctgaaggatgtgcgcctgcagatcccgatgcaggtctatagcgcggatggcgagctgattgcgcaatatggcgaaaaacgccgtattcccgtcacgctgcagcaaatgccgcctgagctgataaaagcgtttatcgccaccgaagatagccgtttttatgagcatcatggcgttgacccggtcgggattttccgcgcggccagcgtcgcgatgttctccggccacgcctcgcagggcgccagtacgattactcagcagctggcgcgcaacttcttcctgagccctgagaagacgctgatgcgtaaggtgaaagaagccttcctcgcgatccgcatcgagcagttgctcaataaagatgaaatccttgagctgtacctgaacaaaatctatcttggctaccgcgcctacggcgtcggcgcggccgcgcaggtctattttgggaaatccgtcgaccagcttacgctgagcgaaatggcggtcattgcgggcctgcctaaagcgccgtcgacgtttaacccgctctactccatggatcgcgcaaccgcccgccgcaacgttgttctctcacggatgctgagcgaaggctacatcacgcagtcgcagtacgatcaggcgcgtagccagacgattgacgccagctaccatacgccggaaatcgccttctcctccccgtatcttagcgaaatggtgcgtcaggaaatggtcagccgctacggcgagcaggcttatgaagacggttatcgcgtctacaccaccattacccgtaaaaatcagcaggccgcccagcaggcggtgcggaataacgtgctggattacgacatgcgccacggctatcgcggcccggaaaaggtgctgtggaaggtgggcgaaacgccgtgggataaccagaaaatcctcgaaaccctgaaaaaaaccccgagtaccggaccgctctctccggcggtagtcacttcggcaagcccgcaggaagccgtcgcactcatgagcaacggcacctcggtgtcgctgaatatggaaggcgtccgctgggcgcgtcggtttatctctgatacccaacagggcgccacgccgcgtaaagtgaacgatgtggtgcaggccgggcagcaggtgtgggtccgccaggtgggtagcagctggtggctatcgcaggtgcctgatgtcaactcggcgctggtatcgatcaacccgcaaaacggggcgatcattgcgctggtcggcggcttcgatttcaaccagagcaagttcaaccgcgcgactcaggcgctgcgccaggtcggttctaacattaagccgttcctctacacagcggcaatggataaaggcttaacgctggcgagcatgctcaacgatgtgccgatttcccgctgggatgccggctccggctccgactggcggccaaaaaactccccgccgcagtatgcgggccctatccgcctgcgtcaggggctgggtcaatcaaagaacgttgtcatggttcgcgcgatgcgcgccatgggtgtggactacgcggcagagtatcttcagcgcttcggcttcccggcgcagaacatcgtgcggacagaatcgctggcgctgggctccgcgtctttcaccccgcttcaggttgctcgcggctattcggtgatggctaacggcggtttcctggtcagcccttatttcatcagcaaaatcgagaacgatcagggcggcgtcatttttgaagagcggccaaaaattgcctgcccgcagtgcaatattccggtgatttatggcgatacgccgaagtccgatgtgctcgagaacaaagacgttgaggacgtagcgacctctcaggacccgcaaaaccccggcgttcctccgcagccgcagctggcgcaggcgaaccagtcgctggtggcgcaaagtggcgcacccgagtatgcgccgcacgtgatcaacaccccgctggcgttcctgattaaaagcgccctgaacactaatattttcggcgaaccgggctggatgggcaccggctggcgagcggggcgcgatctgcagcgtcacgatatcggcggcaaaaccgggaccaccaacagttcaaaagatgcgtggttctcgggctacggccctggcgtggtgacgtcggtatggattggcttcgatgaccaccgtcgcgaccttggccgcaccaccgcctccggggcaatcaaagatcagatatcgggctatgaaggcggcgccaaaagcgctcagccggcctgggatgactttatgaaaaacgtgctgcaaggcgtaccggaagaaccgcttacgccgccgccgggtattattacggtcaacattgaccgcagtaccggtcagttggccagcggcggtaacagccgcgctgagtactttattgagggcactcagcctacccagcaggcggttcatgaagtcggcaccaccattaccgatggcgggggggaaacccacgaactgttctgacaaaaaaagcgcctgcgggcgcttttttttggctgacggaaaaccggttgtagatatcgtgccacggctggcgcctttaccacgacctaccgcaacggctccgtaaggcccgccgtggggcatttttcgttatccgggagtgacgctacagccgcccctgcgcctgcagccattcgcgcagcaggaacagcgcgctaacgttacgcgcttcgttaaagtcttcttcatcaagcagcgtcatcagctgcgacagcggccagcgaacctggggcagcggctcgggctcgtcgccgggcagcgattccggataaagatcttccgccaccagaatgttcatcttgctggagaagtaggagggggccatgctcagctttttcaaaaacgtcagtttttgcgcgccaaagccgacctcttcttttagctcgcggttggcggcctccagtacgctttcacccggatcgatcaggccttttgagaagcccagctcataggattccgtaccgacagcgtattcgcgaatcaagattatatggtcatcgacaatcggcacaatcatcacggcttcacgggtagaaggccgcatccgttcatacactcggcgcacgccgttgctgaactcgaggtccacgctttcaacattaaaaaggcgcgagcgcgcgactgtttcaacgttgagaatagtgggtttttgtaatgatttgctcattgtcatcggtctatgctgtgattacagcggccattgtgcgatacgcagcacggtttcggcaatcctaatcgctactaatttacatagttgcaactttcccgtcccgagcccgattatcacaatgactaaaaagtcaataggttgaatagtatttgagaatatactgattcctggattttaacgtttttgataaggttgtatgctgctgctttgcataagagatgttcccgctttaacagagtgccgattgcgacggctgttttacctccattgatgaatggcaaccgacgataccagtaagaaaagaataactatgatgggatgggcatgggcacctttctgatatttttgatagctctgctaatctgcgcattgcttatcgggtggtggtatcgcacgcatgcaagacgtcgtcgcctgccgctgctgcaggcctttagcgatgccgcgacgcgcaagctttccgatgaagagcgcagcgccgtagaaaaatacctcgaccgtctcagccgcaaccagcagctgccggcatcaggcgccatcagcgcgccggtaaacctgaccctgaacgaacagagcggcaccgtttatagcgtcacccgagccatcactcgctacggcatcaccaccgacgagctcaacaaatggcgctacttccttgattccgttgaaattcatcttcctcccttctgggaacaacacatcaatgatgaaaacagcgtcgaattaatctccaccgatagcctgccgctggtgattgctctcaacgggcaaaccctcagcgactacccgcacgagtcccgagggttggcgcttgaaaaatcctccgtgcctcaggcttccatccgcggagaagagagcgaacaaattgagctgctgaacatccgcccggaaacccctgaagagcacgcgctcagccgccctgacggtctgcgcgaagccatcctggtggtcaccgctttcctgctgttttattgcagcctaatgactcccaacgttttttccccctggctactgggcggcgggttgcttctcctgcttgcgggcatatggggtatttacgcccccccacgtaaaacatcgctgcgggaaattcactgcctgcgcggcatgcctaaacgctgggggctgtttggtgaaaacgaccaggaacatatcaataatatttccctcggcattatcgatcttatctacccgcgccactggcagccgtggatcgcgcaggacctcggccaacaaacggatatcgacatctatcttagccgccacgttgtccgccaggggcgcttcctgtcgctgcatgatgaggtcaaaaacttcccgcttcagtactggctccgcagcgcgattatcgccctgggcgcgctgctggtcgtcgtgatgctgtgggccagcgtaccgctgaatatgccctttaaattcaccctttcatggctcaagggcgcacaaactatcgaagccacgacggttgcccagctggagaagtcaaagattcgcatcggcgacacgctgcgcctgaaaggcactggaatgtgcaacatccactcgccgggcgcctggacggcaaaagagaactcgtcgtttatgccgttcgattgttcacaaatcgtctggaatgatgcccctcccctgccgctgccggagtcagatatcgtcagtaaggccaccgccctgatgcagaccgttcagcgccagctccatcccgaatctgatgacgattcgcgcgtcagcccggcgctgcgttccgccattcagaagtcaggcatggtgctgctggatgactttggcgatatcgtcaccaaaactaacgacctgtgctctgcgaaagacgattgcgttcgtttgaagaatgcgctggttaacctcggtaatacccgcaactgggaaaccctgaccaaacgcgcaaacgcgggcaagctggatggggtcaacgtcctgttacgcccggtaagcgcggagtcgctggagaatctggtcaccacctccaccgccccgttcatcagccgtgaaacctcgcgcgcggcgcaggcgctgaatagcccggcgcccggcggtttcctgattgccagcgatgaaggcagcgacctggtgaatcagccatggccaggcaccgggttatacgacttccctgcacaccagcagtggagcgaactgcagcgcctggcgggcatgttaatgcacacgccgttccaggcagaaggcatcgtcaccaatctttataccgatgccaacgggacgcagcacatcaacctgcatcgtattcccgatcgcaccggtctgtggcgctatctcggcaccacgctgctgctgctgaccatgctgggctgtacggcgtatcacggcctccaggcttttcgtcgctatcagcgccatcgccagcgtcaggaagagattcagaaatactacgaaagctgcctgaatccggatctcctttcctcaccggaaccgcaagaataattctctgcgcgaccgggtatgataccctgtcgcgcaattttccccctcgctggagacccaccatgcattttgatatcgcctggcaggaggttgataccgttctgctggatatggacggcacgctgctcgacctcgccttcgacaactacttctggcaaaaactggtgccggaaacctggggcgccgcgcggggtctcaacctgcaggaagccagggacgcaatgcgccaggagtaccacgcggtgcaacatacgctaaactggtactgcctggactactggagcgagcgccttggtttggatatttgtgcgatgaccagcgagcaggggccaagggccgcgctgcgtgaagataccgtgccgttcctcgaggcgctaaaaaacagcggcaaacggcggattttgctgaccaacgcccatccgcataatctggcggtgaagctaaagcacaccgggctggatgcacaccttgatttattgctttccacccacacatttggttatccgaaagaagatcagcggctgtggcacgccgtggctgaagaaaccggcttcgacgcgcgtaatacgctcttcgtcgacgataacgaggcgattctggacgcggcggcggagtacggcatccgctattgcctcggtatcaccaaccccgactccgggctggcggaaaaaagctacgctcgccatccggggttgaatgactaccggcatctgatcccctcgctgaccctacaggagaggccatgaaagaaaaacccgtcgaagccgtcaggctggacaaatggctgtgggcagcccgcatttataaaacccgtgcgctggcgcgcgagatgattgaaggcggcaaggtgcactataacggacaacgcagtaagccgggcaaagtggtcgagctgaacgcgaccctgctgcttcgccagggcaatgacgaacgaaccatcgtggtaaagggcattaccgaacagcgcagacccgccagtgaagccgtcgcgctttatgaagagacggcggagagcatcgagaaacgcgagaaaatggcgctggcgcggaagatgaacgcgttaaccatgccgcatcccgacaggcgaccggataagaaagagcgccgcgacctgatgagatttaaacacggcgatagtgaataactgtggcccgcaagagagatgattatgactcaacacgatcaattacaccgctatctgtttgaaaactatgccgtacgcggtgagctggtaaccgtttcagaaactttagaacagattctgaccaaccatagctacccgcagccggtgaaaaccgtgctggcggaactgctggttgccaccagcctgctgaccgccacgctgaagttcgccggcgatattaccgttcagctgcagggcgatggcccgctgtcgctggcggtgatcaacggcaacaaccagcagcagatgcgcggtgtagcccgcgtccagggcgagctcccggaaggggcggacctgaaaaccatggtcggtaacggatatctggtcattaccatctctccggaagagggcgaacgctatcagggcgtggtcggtctcgagggggatacccttgcggcctgcctcgaagattacttccagcgctccgaacagctgccgacccgactgatcattcgtagcggtgaacacgacggtaaaccgatggccggcggcatgctgctgcaggttctgccggcgcaggacgcacaggcggcggatttcgaacatctgagcaccctgactgagaccatcaaagctgaagagctgtttaccctgccagcgaacgatgtgctctggcgcttgtatcacgaagaagaagtcaccgtttacgagccgcagaacgtcgagtttaagtgcacctgctctcgcgagcgctgcgccggcgcgctgaaaacgctgccggatgaggagatcgatagcatcctggccgatgaaggtgaaatcgatatgcactgcgactactgcggtaatcactacatctttaatgcgatggatattgccgaaattcgtaacaacgcctccccggccgacccgcagctccactaatcatcgcttcgccaggcgcggtttcccttttcgcgcctggcgtcaacgctttttctgcgcgtggtgaatcgattccccatgaaagagttacgtaattttctttcaggtaagcgattacattcacatttcaacagtttttttaattactttttaaccattaagaaacatctacccccaactatgccctaattcctgagataatcccctacgcctcgtgacaggagtcacaacgtttttcgtaagtccgccgtttgtcgagatacgtaaatctatgagcctggtcgcggtctataccccgtaataaaccctacaatttaaagcagtacatattggctaaggagcagtgacatgcgcgttaataatggtttaaccccgcaggatctcaaggcttatggtatcaatgacgtccaggatatcgttcataaccccagctacgatactttgtatgaagaagagctcgcccccaatctggaaggctatgaacgtggcgtattaacaaatcttggtgcaatcgccgtagataccggtatttttaccggccgttctccaaaagataagtatatcgttcgtgatgacaccacccgcgatacggtgtggtgggctgataaaggcaaaggcaagaacgacaacaagccgctctctgaggaaacgtggcagcacctgaaggggctggtgacccgccagctctccggcaagcgtctgtttatcgttgacgccttctgcggcgccaacgccgacacccgcctgagcgtccgctttattaccgaagtcgcctggcaggcgcatttcgtgaagaacatgtttatccgaccaggcgatgaagagctggcaaacttcaaaccggacttcatcgtgatgaacggcgccaagtgcaccaacccgcagtggaaagaacagggtctgaactccgagaacttcgtcgcgttcaacctgaccgagcgcattcagctcatcggcggcacctggtacggcggcgaaatgaaaaaagggatgttctcgatcatgaactacctgctgccgctgaagggcatcgcctccatgcactgctccgccaacgtaggggaaaaagaggatgtcgccatcttcttcggcctttccggtaccggcaagaccaccctctctaccgatccgaaacgccgtctgattggcgatgacgaacacggctgggatgacgacggggtcttcaacttcgaaggcggctgctacgccaagaccattaagctttccgaagccgcagagccggatatctaccatgcgattcgccgcgatgcgctgctggagaacgtggtggtgctggccgacggcaccgtcgattttaacgacggttcgaagaccgaaaacacccgcgtctcttatccgatcaaccatatcgagaacatcgttaagccgatctctaaggccggtcatgccaccaaggttatcttcctgaccgccgacgcctttggcgtcctgccgccggtttctcgcctgaccgccgaccagacccagtaccatttcttgtctggcttcaccgccaaactggcgggtaccgagcgcggcgtcacggagccgacgccaaccttctccgcctgcttcggcgcggcgttcctgtcgctgcacccgacgcagtacgcggaagtgctggtgaagcgcatgcaggcgtccggcgcgcaggcctatctggtcaacaccggctggaacggtaccggtaaacgtatctctatcaaagatactcgcgccattatcgacgcaattcttgatggttcgctggacaacgccgaaaccttcactctgccgatgtttgagctgcagatcccgaccgagcttcccggcgtggatacccatatccttgacccgcgcaacacctacggatcgccggagcagtggcaggagaaagcggaacagctggcgaagctgtttatcgagaacttcgagaagtacaccgatacgccggcgggcgctgcgctggtggccgcggggccgaaacgctaatcgggtccgcagaaatgaaaaagccgggaatcgcttcccggcttttttatcgcgttgacatcacgctggcttcttcttactcgccgccttgcgccgcttatccagatccttaagcagcttattcacctgctcatcggcaaacatcgcctcgagcgtggtggagagcttgcgacgccagtttggatactccgtgctggtgcccggaatattgaccggctcggccatctccagccagtcttccggctgcaggcccagcagggcgctgttgctgtcggcaatatagcgctgcattccacgattgagggtcgacgtcatcgccatcagcgacgctttgtgcccggtacgcttcggcagacagccgtagcggtgcagagcgtccagcagcccctgcttcgcccgctcgcggtcctgatacagtccgcgcagtaccaccgcatccggatacaggccaagcgatttacccagcgtcaggtcgccgctttcccagtagccgcgcagcgttggcaggtcatgcgtcgtagccacagccattgattgctccggatacgccttcggcgcacggaaagtcttctcgtggtcattttcgaaatagagcactttgtaagagtaaacgccgcttttacgcagcttaccgacgatctctaccggtacggttcccagatcctcgccgatcaccatacagcgatgacgcttactctccagcgccagaatcgacaacagatcgtcgaccggatactgcacataggcgccgtgatcggccgtttcaccgtaagggatccaccacaaacgcagcaccgacatcacgtgatcgatgcgcagcgccccgcagttttgcatgttggcgcgcagcagttcgacaaacggctcataggcgcgcgccacgatgatatgcggatccatcggcggcaggccccagttttgtcccagcgggcccaggatatccggcggcgcgccgacggaagctttcaggcagtacagctcgcgatcgcaccaggtttccgccccgccttccgcaacgcccaccgccaggtcgcgatacaggccgatcggcatggcgtcgttctggctggtatgccagcattcggcaaactgagtgaaagcgagccactgcagccacaggtaaaaattcacctcatcggcgtgttcggtgcagaacgctttaacctccgggctatcggtatcctgataagccttcggccacgcgggccagccccagcgcagcggatcctgcttaacctgccaggcgtgcagcgcgtcaaacgccgcctgccagtacaggctttccccctcgcgcgccacaaactgacggaactccgccgtcgtctcatcgttacgtgcggaaaaacctttccaggccatgcgcagcgcagtgagcttaagggcggtcacggcggtatagtcaacatcatcggtctgacgcgcggcctgtagggcctgctgcgtagccggtgattgccaccatttctgcgcttctttgctgtgtcggaaatcctctaccgcattgacgtctatatagataacgttgagccagcggcgcgaagaggggctgtacggactggcgctctccggattagccggatagagcgcgtgaatcgggttaagcccgataaacgcaccgccgcggcgggcgatttccggcagcatcgcgcgtaaatcgccgaagtcgccaatcccccagttcttctccgagcgcagcgtatacagctgtacgcaggttccccacagcttcttgccatccttcagcgcctgcggttcgtagcagcgcgcgggcgcgacgatgacccggcagtgccagcggtcgccgtcctgagtcagcgtcagcgtgtggtacccttccggcaatcttgccggcagcggcagcgtttcaccgccgcgcgcctggccctgatactgtttcccttcttcggtggtgaggatccagtggaactccccctggcccgccaccggcagagacatctttttgccgtaggtgaacacctgcaccgcaggcagcgggttaaccgccgccttcacggcgctcgctgtacgatgcatcgcatcaagcagccgctgcttggtcaccgcagcaatggactgcggctttccatgagcgttgatgtagcttgggcttattcccgccgccagggcagcgttatcaaggcgtttagtctccataggcctgtccttagcgttttgcctgccagatacgttgctgataatcgcgaatcgagcggtcggagctgaacatgccgcagcgcgcggtgttcaggatcgctgcgcgcgtccaggcctcctggtcgcgatacagcgcatcaacctgcttctgcgccgccacgtaggcttcaaaatccgccagcaccaggtacggatcgccgcctttcagcaggctatgcagcatctggtcaaaggcatgcttatcgccatcgctatatttgccgctctccagctctttcagcaccgcgtccagcagcttgtctttcttacgccatttcagcggatcgtagcctttggccttcagcgctttcacttcttccacggtatgaccgaagataaagatgttttcgtcacccacctgctcagcgatttccacgttcgccccgtccagggttcccacggtcagcgcgccgttcagcgccagcttcatattgccggtaccggaggcctctttacccgccgtagagatctgctcggagacatccgccgccgggatcagcatttccgccgccgagacgcagtagtccggcaggaataccactttcagcttatcgccaaccagcggatcgttattgatcgctgcggcaaccttgttgatcgcccagataatattcttcgccaggtagtagcccggcgccgctttcgcaccgaacaggaacacgcgcggtacgcggtccgtctgcgggttctcgcggatttctttgtactgcgcgaggatgttcagcaggttgaggtgctgacgtttgtactcgtgcagacgtttaatctggatatcgaaaatcgcctgcggattaatctcgataccggtacgccgcttcacaaactccgccagacgaaccttgttggccagcttaatgtcgcgatacgtctgacggaacttagcgtcatcggcatatttttcgaggttgatcagctggtcgagatcgttggcccactctttcttcagggttttatccagcagcgcggccagagccgggttgcactgtttgatccagcggcgcggggtaataccgttggtgacgttatggaatttattcggccacagctggtgatattccgggaacagatctttcaccaccaggtcggagtgcagcgcggcaacgccgttaaccgcaaagccgctcaccacgcacatgttcgccatgcgaacctgtttatcgtgcaccaccgccagtttcgcccatacctgcttatcgcccggccaggttttatccaccagcgttttaaagcggtcgttaatctgtttgatgatctgcatgtggcgcggcagcagcgctttcaccagcttctcatcccagcactccagcgcttccggcatcagggtgtggttggtatacgcgaaggttttgctggtaatcgcccaggcgtcgtcccagctcagctgatgctcatcaatcagcacgcgcagcagttccggaatcgcaatcgtcgggtgagtatcgttaagctggatgacttcataatccgctagctccgccagcttgcggcccgccagatgatggcgacgcagaatatcggcaaccgagcaggcgcactggaagtactgctgcatcagacgcagttttttacccgcctgatggttatcgttcgggtagagaactttcgtcagtttttcggcgtcaatgccctgctgttcggcacgcaggaaatcgccgtcgttgaatttggtcaggttaaacggatgcgcgtgcttagcctgccacaggcgcagcggctgagccacgttgttgcggtagcccagcaccggcagatcccaggcttcgccggtaatcacgaatgccggtacccactcaccgcttttggtcactttaccgccgaggccaacctgcacgtccagcgcttcgttgtggcggaaccacgggtagctattacgcccccagtcatccggcgcttccatctgctggccgtcagcgaaagactggcggaacagaccgtactggtagttcaggccgtagccggtcgccgactggccaacggtagccattgaatcaaggaaacaagccgccagacggccaagaccgccgttgcccagacccgggtcgatttcctcttccagcaggtcggtcaaattaatgtcgtgcgcctgaagctcatcgctgacctgctgataccagccaaggttaagcaggttgttgccggtcaggcgaccgatcaaaaactccatggagatatagtttacgtggcgctgcccttcggccgctttcgctaccggctgagccgacaacagctcggacagcgcaccgctaacggcgcgccaccactgacgctgggtcatctcggaagcggactgtaaaccaaaatgctgccactgacgcgtcagtgcagcctgaaactgagctttgttaaaagaagtctgtgacataagtaatccgggtcctttactaaaacgttagcgttagtgtgccgacctcccggagtcacgtcctcatcccgccagggattagccggggaggagtagcagggatgagcgaaaagtgtgatcgtggccactattacgttagcctaccggccaaaattatgctgcaaaattcgccataccggaacaacaaaccggcccgcctggcgctcaaaattttgttacaagccaggacgataaaagcaagcgaaacgccgttgtgtaaatatcgacaaataaaagtaaatatcaggggaataaacgtactttaatgtagaaatagctcaaaaggatgacttataagatttcgctgataatattttattaaaaacaaacagctactaattttgtaataaaacattagcttattgtgtctgtaacctgcgcaatcccaacaaccgcgcacgctgacgcggatttctttgaatttatctctatgtccaaatttgtgacatagagcaaattcaagagcataaaactcggacataacttgcaataaaattcattatggccgaccttattggatattaattacgaagcgcaaaaaaattcgcaactcctcccttgcacagcgaaatgaagaactatgttgattccgtctaaattaagtcgcccggtccgccttgaacacactgtggttcgtgagcgattgctggcgaaactttccggcgcgaacaattatcgtctcgcgttggtgaccagcccggctggctacggtaagaccacgctcgtgtctcaatgggcggcggggaaaaacgatctcggctggttctccctggatgaaggcgataaccaacaggagcgttttgccagctatcttatcgccgccgttcaacaggcaaccggcggccactgcgcggccagcgaagcgatggtgcaaaaacgccagtacgccagcctgccttccctcttcgcacaactgtttattgaactggccgactggcagcgcccgctgttcctggtgattgatgattaccatctgatcagcaatccggtgattcatgacgcaatgcgtttcttcctccgccatcagccagaaaatatgacgctggtggtgctgtcgcgtaatctgccgcagctgggtatcgccaacctgcgcgtgcgcgatcagctgctggaaatcggcagccagcagctggcttttacccatcaggaagccaagcagtttttcgactgtcgtctcagttcgcccattgaggccgacgacagcaaaaggctgtgcgacgatgttgccggctgggccaccgcgctacagctgattgccctctcggcgcgccagaacaatacttccgcccaccactccgctcgtcgtcttgccggcattaacgccagccatctttctgactacctggtcgatgaggtgctggacaacgtggacccgcggacgcgtaatttcctgctgaaaagttcgctactgcgttcaatgaacgatgcgctcatcgtccgcgttaccggcgaagagaatggccagatgcagctggaagaaattgaacgtcagggcttattcctgcagcggatggacgattccggcgaatggttccgctaccatccgctgttcggcaacttcctgcgccagcgctgccagtgggagctggcggttgagctaccggaaattcaccgtgcggcggcagaaagctggatggcgcaaggcttcccgagcgaagccattcatcacgccctggccgcgggtgacgccaaaatgctgcgcgatattctgctcaaccacgcgtggggcatgtttaaccacagcgaactgagtttgctggagcagtccctcgccgcgctgccgtggtcaaacctgctggaaaacccgcgtttaattcttttgcaggcctggctgatgcagagccagcaccgctatagcgaagtgaataccctgctggcgcgcgccgagcaggagatggatacggaaatggacaccgccatgcacggggatttcaacgccctgcgcgcccaggtggcgatcaacgcgggcgatcaggacgaagccgagcgcctggcgatggtggcccttgatgaactgccgctggccagctactacagccgtatcgttgccacatccgtacacggtgaagttctgcactgcaaaggccagctgagcaaatcgctggcggtcatgcagcagacggaacagatggcccgccgtcatgacgtctggcactacgcgttatggagcatgatccagcaaagcgaaatcctctttgcgcaggggttcctgcaggccgcctgggaaattcaggaaaaagcgttccagctgattcgcgaacagcaccttgagcagctgccgatgcacgagttcctgctgcggattcgctcccagctgctgtgggcctgggcgcggctggatgaagcggagacctccgcgcgcagcggcatgaacgtgctttcctcctatcagccgcagcagcagctgcagtgcctgacgctgatggtacagtgctcgctggcgcggggcgacctggataacgcccgcagccatttgaatcgcctggaaaacctgcttggcaacggccattaccatagcgactgggtatccaatgccgacaaagtccgggtgatctactggcagatgatcggcgataaagccgccgcggcaaactggctgcgccagacgccaaaaccggaattcgctaacaaccatttcctgcagagccagtggcgcaatatcgcccgcgcgcagatcctgctcggcgattttgattccgccgaaatggtgctggaagagctaaacgataacgcccgctcgctgcgtttgatgagcgacctgaaccgcaacctgctgctgctcaaccagctctactggcaggccgggcgtaagagcgaagcgcaaaaagcgctgctggaagcgctcaccctcgctaaccgcaccgggtttattaatcattttgtcattgaaggcgaagcgatggcgcagcagctgcgccagctgattcagctcaatacgctgccggagctggagcagcaccgcgcccagcgtattctgcgcgatatcaaccagcatcatcggcataagttcgcccactttgacgagagcttcgtcgaacggctgctgaaccacccggaagtgccggagcttatccgcaccagcccgctgacccagcgcgaatggcaggtcctgggacttatctattccggctacagcaacgagcagattgccggtgagctggacgtggccgccactacgattaaaacgcatatccgtaacttgtatcagaagctgggcgtggcgcaccgccaggatgccgttcagcatgcccagcagctgttgaaaatgatgggatacggggtttaagccgctatcggctcgcttcaggcaacataaccgttacgtcatcgccggcggcaggtttccctccgcctgacggcggagataatcctgtcactcatcaacaccacgccatcaatcgcgcgcgtcaggcggagcaacgctctggcatgacccggaaatgctaaaggttcagcacagctccagctgaaggttgttatcggtaatcaccttcagtacgccggcgggcggcatcacatcggtatagaccgcatcaaccatgctgatgctgcccatgttgaccatcgcattacggccaaatttagaatggtcaacgaccagcatcacgtggcgggagttttcaataatcgcccgtttggtgcgcacttcgtggtagtcaaactccagcagcgagccatcgctgtcgataccgctgatgccgagaatgccgaaatcaaggcgaaactgggagataaagtccagggtggcctcaccgataataccgccatcccggctgcgcagctcgccgccggccaggataatgcggaagtcctctttcaccatcagcgtattggcgacgttgaggttattggtgacgatgcgcaggtcgttatggttaagcagcgcgtgggccaccgcttccggcgtggtaccgatatcgataaacagcgtcgcgccatcggggatttcgctcgccaccttgcgggcgatgcgctctttttcctgggtctgggtcgattttctgtcgtgccaggacgtattcaccgagctggacggtagcgcagcgccgccgtgatgacgcagaatcattttctgatcggctaaatcattcagatcgcggcgaatggtctgcgggctgacggcaaactgctcgacaagctcttcggtactgacgtatccctgtttttttaccagctcgataatcgcgtcatgacgttgtgtttgtttcatgaaatatccctgggaatctctacgttcgttttcgcacattctgcgtatcaacaaacgccatcgccagcccggtcaccagaccggccacgtgcgcaccgttcgcaatcgacatgccgaaaacatcaaaccatccagcaattaaccatactaaagagaagagtatcaagccgcgctgtaaataaacgccgctctgcggatcgcgctcgccccgtagccagacatagcccattagcgcatagactacgccggagagtccgccaaaccacgggccgctgaactgatgctgcacaaagccgctcagcaaagcggcgatcaccgtaatcaccaccagcttgccgctgccgatgcgcttttctaccgctccgccgaggtaccaccaccatagcaggttgaacagaatatgcatcagcgagaagtgcataagcgcatggctaaagtagcgccagacttcaaatttcagcgaaggatcgtagggccaggccagcagcagcatgaccggttgatcgccaatgaccgtttgcaggacaaagacggcgatgcaggcgaagagcacgccccaggtcaccggcccggcgttatggcgaagcgtcgctaaaaagggaaagcgctggtagtgcagcccgctattggtgtgccccgactgccagctggcggcgaggtaacgcggatcggcgggattttccagaaagcgggccagctcggcctgtacgcgtccggcctgggactcatcagccagccagatatcgctctgcgtatgctgctgaatagtcagaataatgccctgcgtcgccatatagtcgacaaacgcctgggccacgcgcgggttggcaaaagaggtaatcattaacatgcagcggatcgcttattccacacaaagggagatattatagccacaaccggcgctaacgcctaaagtgcgccatgcgcgacttccgccggaaaatgccggtgccaggcatcaaacccgccgtccacgctgtaaaccttgtcgtaaccctgctgcagcagatactgcgcggcgcctttgctgctattgccgtgatagcacatcaccatgaccgccgtatcaaagtcgttgtcgcgcataaacgcgcccagcgtatcgttggtcagatggaatgcgcccggcgtgtggcccatcgcatagctttgcgggtcgcgaatatcgaccagcaccgccgtctgctggtgcattttctggtgggcttcttctacgttaatacattcaaagcgatccataagctctcttctttatatacggatatacaggcaggcggcgaaacgccctggattttagcgtctagtgtacagcctggcgctaaataaacgccaatatgttacacgcatcactctgaaatgtttttttgatgttaccaatagcgcgattgtttgctatattgagcgatatcgaacatttgtgagcttaaacgaaagtgtaagaggtggcgagcgtggaaaccaaagatctgattgtgatagggggaggcatcaacggtgccggtatcgcggcagacgccgcagggcgtggtttatccgtactgatgctggaggcaagcgaccttgcctgcgccacatccagcgccagctcaaagctgattcacggcgggctgcgctaccttgaacactatgagttccgtctggtgagcgaagcgctggccgaacgcgaagtgttgttgaaaatggccccgcatatcgccttcccgatgcgctttcgtttaccgcatcgcccgcatctgcgtccggcgtggatgatccgcattggcctgtttatgtacgatcatctgggcaagcgcaccagcttacccggctcaaccgggttgcgttttggcacagaatcggtacttaaacctgaaatcgtgcgcggtttcgaatattccgactgctgggttgacgatgcgcgtctggtgctggccaatgcccagatggttgtgcgtaaaggcggggaagtgcgcacgcggacccgcgccatctcggcaaaacgtgaaaacggtttgtggattgtcgaagccgaagatattgatagcggcgagaagtttacctggcaggcgcgcggtctggttaacgccaccggcccgtgggtcaaacagttcttcgacgaagggatgcatctgcgctcgccgtacggtattcgcttgatcaagggcagccatatcgtggtgccgcgcgtgcacacgcagaaacaggcctacatcctgcaaaatgaagataaacgcattgtgtttgtgatcccgtggatggatgaattttccatcatcggcaccaccgacgtggagtataaaggcgatccgaaagcggtagcgatcgacgacaacgaagtgaactacctgctgaacgtctataacgcccactttaaaaagcctctcacgcgggacgatatcgtctggacctactccggcgtgcgcccgctgtgcgacgatgaatccgactcgccgcaggcgatcacccgcgattacactcttgatatccatgatgataacgggcaggcgccgctgctgtcggtctttggcggcaagctgaccacctatcgcaagctggccgagcatgcgctggagaaactgacgccttactacaaaggcatcggcccggcatggaccaaaaccgcggtgctgcccggcggcgatatcggcagcgaccgtgacgactacgcggcgaaactgcgccgccgcttttcgtttatcagcgaatcgatggcccgccattacgcccgcacctacggcagcaacagcgagctaatccttgataaggcgacctcactggacgatctgggtgagcatttcggccatgagttttttgaagccgaactgcgctatctggttgagcacgaatgggttcgttcgctggatgacgcgatctggcgtcgcactaaacaaggtatgtggctgaatgacgagcagcaggcgcgcatcagcgagtggctggcgcagcacgcgggaaagtctgagctgtcgctggcgtcgtaacaccgcaaacagtaacggggcctgcgggccccgttttttatggctaatccgttacaaccttaccggatcgatatgccagatatggtcggcatactctttaatagtgcggtcagaagagaagtagcccatattggcgatattcagcatcgctttattggcccactcctccggatgacggtacagctcatccaccttatcctgacaatccacgtagctacggtaatccgccagaacctgatagtggtcgccgaagttaatcagcgaatccagcaggtcacggtagcgtcccggctccgatgggctgaacaggccggtgccgatctgcgtcagcgcctggtgcagctcttcatcctgctcatagtaatcacgcggtttgtagccgttagcccgcagggcttcaacctcttccgccgtattaccgaagataaagaaattatccgccccgacgtgctcctgcatctcaacgttagccccgtccagggtaccgatggttaacgcgccgttaagcgcgaacttcatgttgctggtaccggacgcctccgtccccgccagcgagatctgctcggagagatccgccgccggaatgatcagctgcgcgaggcttacgctgtagttaggaatgaacaccactttcagcttatcgccaacgtccggatcgttattcaccaccgccgcgacgtcattgattaaatgaataatatgcttcgccatgtagtaagccgaagccgccttgccggcgaagatattcacgcgcggtacccactcggcgtcgggatcggccttaatgcgattgtagcgggtgatcacatgcagcacgttcattagctgacgtttgtactcgtgaatacgcttgatctgcacatcgaacagggctttcgggttgaccaccacgttaagctgctggccgatgtagttcgccagccgctgcttgttttccagcttggcctggcgcaccgcctggttaaccttcggatagtcaatatgctgctccagctccttcagctggcttaaatccgtacgccaggtgtggccgatattttcatccagcactttcgacagcggcggattcgccagcgccagccagcggcgcggagtgacgccgttcgtgacgttggtaaagcgcatcgggaagattttggcaaattcggcaaacagcgactcgaccatcagccgggagtgcagctccgacacgccgttgaccttgtggcttaccaccaccgccagccacgccatgcgtacgcgacgcccgttagactcgtcgataatcgacgtacggcccagcatcgccgtatcgttgggatactgctcctgcagggtcttcaggaagtagtcattaatctcgaaaataatctgcaaatgacgcggcaggattttacccagcatatcgacgggccaggtctccagcgcttcgctcatcagggtatggttggtataggagaagacctggcaggtcacctcgaacgcctcatcccagctaaacttatgctcgtcaatcagcaggcgcatcagctccggaatcgacagcaccgggtgcgtgtcgttgaggtgaatcgcgattttgtccgccagattggcgtaggttttatgcagctggtagtgacggctgaggatatcctgtaccgtcgccgacacgaggaaatactcctggcgcaggcgcagctcgcgcccggaataggtggagtcatccggatagagcacccgcgacacgttctcggagtggtttttatcttccaccgccgcgaagtagtcgccctggttgaatttaccgaggttgatctcgctgctggcctgcgcgctccacagacgcagcgtgttggtggcatcggtgtcgaaacccgggatgatctgatcgtaggcttcggcaataatctcttcggtctccacccagcgggaatgtttaccttcctgctgaatgcggccgccgaagcgcactttgtagcgcgtattgtggcgctcgaactcccacgggttgccgtactccagccagtagtccggggactctttctgccgcccgtcgacgatattctgcttaaacatcccgtagtcgtagcgaataccgtagccgcggcccggcaaacccagcgccgccagcgagtcgaggaagcaggcagccagacgaccaagaccgccgttgcccaggcccgggtcgttctcttcgtcaatcagctcttcaagattcagccccatctcttccagcgcgctgttcacgtcctcataaataccgagcgatagcagcgcgttggacaaggtacggccaatcaaaaactccatcgacagatagtaaacctggcgcacttcctgagagagctgcgcccggtttgaacgcagccagcgctcaaccatgcgatcgcgaacggcgaacagcgtggcgttgagccattcatgtttgttagcgatagccggatctttgccgatgataaacatcagcttataagcaatagagtgctttaacgcctcaacgctcagggtgggtgatgagtagctaaaaggtacattcatagctttggctcctggttacagcaagcgttgataaagttcgcggtaagaatttgcggcaacctgccagctaaaatccatattcatcgcctgacgctggacgtagcgccagagcgacgggcgcgaccacaggacgaatgtgcgtcgaatagcccgcagcagcgacaaagcgttgctatcttcaaaaacaaagccggtagccagaccgtcggcgagattctccagcgagcaatcggacacggtgtccgccagtccgccggtacgccgcaccagcggtagcgtgccgtacttcaggccgtacagctgggttaagccgcacggttcaaaacggctgggcaccagaatcacatcggcgccgcccataatgcggtgcgagaaggcttcatggtagccaatctgtacgccgaccttgcccggatgctcggccgcggcggccaggaagccctcctgcagcaccggatcgcccgcccccagcagcgccagctgaccgccctgctccagcaggcccggcagcgcctcaagcaccaggtccagccccttctggctggtcaaacggctgacaacggcaaacagcggcgctttgtcatccaccttcagccccatggcgatttgcagctggcgtttgttttccgctttatcttccagccgatcgcgatcgtagcgcgcggccagcagcaggtcgctttccggattccagatatggtcatccaccccgttgaggatcccggaaaggcggccctcatgctgccgctgacgcagcagcccttccatgccgtaagcgaactgcggctcggtgatttcgcgcgcataggtcgggctgaccgccgtaatatggtcggcgtagtagagccccgccttcagaaaggagatctggccgttaaattcaaggccatgaacgttgtagaacgaccacggcagctcaatgtcgttcatatgccacgagtagaacatcccctggtaggccaggttatgcaccgtaaagaccgacttagccgggtggccgcgcgccgccagataggccggcgtcaggcccgcatgccagtcgtgggcgtgaacaacgtcagggcgccagaaaggatccaggccgcaggccatctcgctaccgacccatcccagcagcgcaaagcgcagcacgttgtcggtataggcgtgctgattggtatcgtggtaagggctccctgggcgatcgtagagatgcggggcatcaatcaaatagatgcccacgccgttaaagtgaccgaacagcaaagtgatgcgcccggcaaacgtctcccggcgcgtcaccacctgcgcatccgtcacgccgcggcggatatcaggaaatgcgggcagcagtacgcgcgtgtcgacgcccccggcaatttgcgctgcaggcagcgcgccgatcacatccgccagtccaccggtttttaacagcgggaacatctctgaacatacatgtaatacctgcattagcgctcctgtggataccccaatttccgcagcatgtcgcgggtgaccagcacgataccttcctccgagcggtagaaacggcgtgcatcctcttccgcgttctccccaacaaccataccttccgggatcacgcaggcgcggtcaataatgcagcgacgcaggcggcacgaacggccaacccaaacctctggcaacaagactgccgaatcaatattacagaatgaattcacccgcacgcgcgggaacagcaccgactgcacaaccaccgaaccggagataatacagccgcctgaaaccagcgagttcagggtcatcccgtggctgcccgagcggtcctggacgaattttgccggaggcaaaggctccatatgggtgcgaatcggccagttctgatcgtacatgtccagttccggggtcaccgaagccagatcgaggttggctttccagtacgcttccagagtcccgacatcacgccagtagggctcagactgcggatcggactgcacgcaggaaagcgggaaaggatgtgcataagccatgccagctttggtgattttcggaatgatgtctttaccaaaatcgtggctggagctttcatcgctgtcgtcttcttccagaagctcataaaggtaatccgcgtcaaagacatagatacccatactcgccagcgatttgctggcatcgcccggcatcgctggcggattagccggtttttcgacgaaatcgataatcttatcgctctcgtccaccgccatgaccccgaacgcccgtgcttcttcaataggcaccggcatacaggccacggtgcaacgcgcgcctttttcgacgtgatcgataagcatgcgcgagtagtcttgtttgtaaatatggtcgcccgcgaggataacgacgtactccgccttgtaacgacgaatgatgtcgaggttctgcgtcaccgcatccgccgtgccgcgataccagttttccccctgcatcctttgctgggcgggcagcaggtcaacaaactcgttcatctcttcattgaagaacgaccagccgcgctggatatgctgcaccagcgtatgcgattgatactgggtgatgacgccgatgcgtcgaatgcctgagttaatacagttagataacgcaaaatcgataatgcggaacttgccgccgaaatggacagcaggtttcgcgcgtttattggtcagatccttcagacgggtaccacgtcccccggcaaggatcagcgcaacggatttgatcggcaactgacgcgccagcatcaatggatcgttcttttctaccccaaccataattaactccttttttactccccagcttgcctgcccttctcgtcgcgccgccgcttcgagaccaaccggaagccccgaggttacgacctttgaaatacgcacactccgtgcgcgggcccatgccagacagctatagtgaccggattatcctctccggcgaaaggtggaatggcgcgccattcccccgcgggtaaaaccatctctgccacctcggcggtggcgttgagcgccatcagccagcgatcggacaatatgatctgcatacgcggcgcaccgtgctgccattcatcggcggacagcggctgcgcatgttggtttaaccagcgaacgctgccgtctccctcctgccaccagcgattctcggttaaagccggaacgcgctggcgcagatgaatcaacgcggcggtgaacgcggtcagcccgcggttagtatggttccagtccagccaggtcaacgcattgtcctgacagtaagcattgttgttgccatgctggctgtgaccgtgttcgtcacccgccagcagcatcggcgttccctgcgccagcagtagcgtcgccagaagagcgtgaacgctggcacggcgccgttcaatcacggcaagactcccttctaatccttctataccattattgttgctgtagttattgttagtcccatcgcgattctcctccccgtttgcctcattatgtttctgattgaaacaaacgcagtcgcgcagggtgaaaccatcgtgcgcggtgaccaggttaaccgccgccgaaggcgctctgccgttacgctgaaaaacgtcgctggatgcggcaaaacgctgagcgaagtcgcccagcgagacgttctgctgcagccagaatcgacgcgcggtatcgcggaaatggtcgttccactcggcgaacagcggcggaaagttacccacctggtagccgcccgggccgatatcccagggttccgcgatcagcttgacctcagccagacgcgggtcgttacggatggcctcaaacagcggcgcatcctgacgaaacgccggcgtccgccccatcaccgaggcgaggtcgaaacgaaagccgtcgacgtggcactcgtcaacccaaaagcgcaggcactggcgggcatactccaccacgccggggtggctgaggttgagggtgttcccgcagccggtccagttgtggtaatcgccgtcttccctgatccaataatagctacggttatcgattccgcgcagggagaaggtcggcccttccaggtctatctccgcgctatggttcagcaccacgtcaaggatcacttcgatgcccgccgcatgtagcgcttttaccgcatcgcgaaactcgtttaacgcctgctccggcgcgctggcgtagcgcgtgtcgagggcgaaaatcgccagcgggttgtagccccaatagttgcttaaccccatccgctgaaggcgcggttcgctggcgaactgcgccaccggcattaactctagtgcagtaatgcccagcatgcggaagtaatcgatcatcaccggatgaccgagcgctttataggtgccgcggatattctccggcagatcggggtgcagatacgtcagccccttgacgtgggcttcataaatcaccgtctggccccacggcgtgcgcggcggcttatcgccgcgccagtcgtaatgcaggtcgatcacccgcgacttcggcgctatcgccgcgctgtcgcgacgatcgggaacgcgatcgccgccgtggagacgttcatcgtcaggcaacccgccgtctacctgatggcagcaggggtcaagcagcagcttcgccgggttgaagcggtgcccttgcgctgggtcccagggcccgtggacgcggtagccgtagcgcaggccaggaccgacatcggcgagccagccgtgccagatatcgccgctgcgcgcgggcaggtcgacgcgtcgctcattgccctgctcgtcaaacacgcagagttccacccgctccgcatgggcggaaaagagcgcgaaattcacgcccttaccgtcgtagctggcccctaaaggcgcgggctttcctgccgtgagtgcgatcattgcgcctcccgcaccagccacaccgtcgccagcggcggcagcgtaatggagagggagtgttcacgaccgtggctggcgatcgggtcgctctcaacgacgccgccgttgccggtgttgctgccgtggtaatgcatggagtcggtgttgagctcttcacgccagcggccgggctggttgatgccaaagcgatactcatgacgcgggaccggggtgaagttgctggcgacgataatttcattgcccgccctgtcgcgacgaacaaagataaataccgaacgctcatggtcgtccaccaccagccattcgaagccgtagggatcgaaatccagctcgtgcagcgctttatggtgacgataggtatggttgaggtcgcgcaccagccgctggacgccgtggtgccagttatcgccgccttccagcagatgccagtcgaggcttgcgtcgtggttccattcgcgcccctgagcaaactcattgcccataaacagcagctttttacccgggaaggcaaacagccagccgtagtaggcgcgcaggttagcgaacttctgccaggcgtcgcccggcatgcggtcgagtatcgattttttgccgtgcaccacttcatcatgagagagcggcaggacaaagttttcggtgtagttgtagagcataccgaaggtcatcttgtcgtgatgatgacggcgatgcaccgggtccagcttcatgtagtcgagggtgtcgtgcatccagccgaggttccacttgaaccagaaacccagcccgccggtggaggaaggacgggaaacgccgggaaaatcggtcgactcttccgccatggttaccgcgcccggcgtctgttcgcccagcacgcggttggtattgcgcagaaactcaatcgcttcaaggttttcccgaccgccgaattcgttcggcacccactcgccctgcttgcggctgtagtcgcgataaatcatcgacgccaccgcatcaacccgcagcgcgtcaatgccgaagcgttcgatccagtacagcgcattgccgaccaggtaattgctgacctcgcggcggccgtagttgtaaatcagggtgttccagtcctgatggtagccttcgcgcgggtcgctatgttcatacagcgaggtgccgtcaaacgaggcgagcgcaaaatcatccgccggaaaatggccaggcacccagtccagaatcacgttcaggcccgcggcgtgcgcggcgttgataaagtagcggaaatcctcccgggtaccgaagcgacgggtgggcgcgtacagcccggtcggctgatagccccagctgccgtcaaacggatgctcgttcaccggcagcagttcgaggtgggtaaagcccatccatttggcatacgggaccagctggtcggcaagctcgcgatagctcagccagaagttattatcggtgtggcggcgccaggagccgaggtgcacttcataaatcgagatcggcgcatcaaactggttagcctgcttgcgctccggcggctgtgcgaccttttccggcagcccgcagatgagcgaggcgctctccggacgcatttgcgcttcaaaagcgtaagggtcggacttcacccgcaggttgccgtgggcatcgataagctcgaatttatacagctggccgttcagcgcgccgggaacaaacagctcccagatgccggactctttacgcaggcgcatcgggtggcggcggccgtcccagtagttaaactgcccgacgaccgatacccggcgggcattcggcgcccatacggagaaacgcgtaccgaccacgccgtccatggtatcggcatgcgcgcccagcgtttcataaggacgcagatgcgtgccttccgacagcagccagacatcgagatcctgcaacagcggaccaaaacggtacgggtcatcaatcaggttctgctgcccgtgccaggtgacggccagctgatagcgaaaaggatttttacgacgcggcagaacgccgctgaagaaaccgcgcgagtcgaggcattccagcttgccgactttgcgtccggtttttggttcaatgacccacacatcggtggcatcgggtaataatgcacgaacttccagcccggcgtcggtgtaatgcatgccaagcacggaaaaaggatccgcaaaatggccggcgataagcgcattaatcacgtccttatcaatacgattagacatggtttcatcctgttgtaggtgtcgccctttcctgtatccggcgacttttttttgacctgaacggcgcagcacgttatgcgtccccctgctccgtcccaccttcaggtaaggagacatcgtgactccttacttaaagcatagccaaggctgagttacctccgttgggaaaaatctaacattcgcgtttactccttgtattacgcaaaaaaaaggggtgtttcaacaccccttttctcatcttgtgacgactacgccagctgtcttagcatgcggcggagcggctcggcggccccccacagcagctggtcaccaacggtgaaggccgacagatactccggccccatgttcagtttacgcaggcgacccaccggggtggtaagggtgccggtaacggcagccggagtcagctcacgcatggtgatatcacgatcgttcggtaccactttggcccacgggttatgcgcggccagcagttcctcaacggtcggaatagaaacatcttttttcagcttgatggtgaacgcctggctatggcagcgcagcgcgccaacgcgaacgcacaggccgtctaccggaatcggtgaggcggtcgcgagaattttgttggtctccgcctggcctttccactcttcacggctctggccgttatccagctgtttgtcgatccatgggatcaggctgcccgccagaggaacgccaaagttgtctaccgccagctcgccgctgcgggtcaacgaggtgaccttgcgttcaatatccaggatcgcggaagccggatccgccagctcagccgcaacatggctgtgcagctggcccatctgggtcagcagctcgcgcatatgccgcgcaccgccgccggaagccgcctgataagtcgccacgctaacccactcaaccagatcctgagcaaacaggccgccgagagacatcagcatcaggctgacggtacagttgccgccgacaaaggttttaacgccgttgttcagacctgcggtgataacgtcctggttcaccgggtcgagaatgatgatggcgtcgtctttcatgcgcagcgaagaggcggcgtcaatccagtagccctgccagccgctttcacgcagcttcgggtaaatatcgttggtgtaatcgccgccctgacacgtgacaataatgtccagcgccttcagtgcttccagatcgaatgcatcctgaagcgtgccaccggtactgccaccaaaagatggagcaggctgccccagctgggaggtggagaaaaaaacagggcgaatggcatcaaaatcgcgctcttcaaccatgcgttgcatgaggacagagccgaccattccgcgccagccgataaaaccaacatttttcataacgtattcctgcgaggtgtgtgctgtttgttccaggccagtttcctactggttagtccttcacattacaaaatgcagctaaagtcgcaagtgaaattaatcaatgattgccaggcaatcagtaacgtaactaattttgcatagcggcagccgtcgctggccccccggaataccctaataattatcagggaatttatatcgcgaaggaaatattttccgccgctattttattgatcaggattatggattacggcagaaattcggttgttttactcttgctaaccaaaccggttaaagccaggcgtggcgcgggtttgtgagccgtatgacgtttatcgtatttctgatagtggcagatcgggagaggggtaaagctaagggttttcgatataagtagagcggaaaaattaacccggcatcgcctcgctccgccgggtgtttcactttgtcttttaactcaatagagtaaacgcaatcatgccgacaatcgccccgacggtgccgaggatggtttccatcatcgtccaggtcttcagcgtttgcgcttcggtcgcgccggtaaacttaccgaacagccagaagcccgcgtcgttaacgtggctgacgacaatagagccgccggcgatgcagatagagagcgccgccatctgcgcgccgctgtagtgcagctgttcgataaccggcatcaccagcccgactgccgtcaggcaggcaacggtcgcggaaccctgaataatacgcaccgccgccgccagcacgaagcaggtgatggcaatcggcaggcccataccggttaacgcttcaccgagggcagggcctacgccggagtcgaccagcacctgtttaaacaccccgcccgcaccgatgaccagcaggatgatgcccgcaggctggagcgcatgaccgcaaatctccatcacccgatctttagccattccctgacgtaccgccagaccatagatagccaccaggcacgccaccagaatcgcggtaaacggatggccgataaactcaaaccattcgtaagcggtagaaccttccggcacaaagcgcgcggcgatggttttcaggccaaccagcaccagcggcagcagaatcagcgacaggctgaagccgaacgacggcattttgccttcgccgaggtgtggctcgctaatatcgtccggaatgtgcagctcaacgtaacggctgatgaagttaccccacagcggcccggcaataatcatccccgggatagcggcgcacaggccaatcaggatcatccagccaaagtcggcgtgcatctgcgaggccagcagcatcggcgcaggccccggtagcaggaacgcggccgcggcggctacgccagcaaacagcgggatcaccagcttcacaaggttggtgccggtatggcgcgccattgagaaagccacgctgatcagcagcacgatcgccacttcaaaaaacagcggcagcgcgcagataagcccggccaggcctatcgcatagtgggcgcgattgtggccgaaagatttcagcatcttaacggcaatctggtcgaccgcgccggtttcatgcaggatcttaccgaacatagcccccagcgcgacgacgatagccagaaagcccagcgtgccgcccatgcctttttccatcgtcgccgcgatcttgtccaacggcattccggaaaaaagccctgctccaatagaaaccaccatcaaagccacgaaggcatgcatacgcgccttcatcactaaaaacagcagcagcaaaacggagccgactgctgttaaaacaagcgttaatgtactcactatttactgcctttgttgatcacctcaatggtgctggcgaccacgccttccaatgactggtcgatatcgacgattaacacatcgctttcatccgcgcccggttcctgcagcgtctcaaactgcgtaaccagcatctgagtcttaaagaagtggcctttacgcgccttcagacgttgttcgataaccgcaaaatcacctttcagatagataaaggagaggttcgggttacctttacgcaggatgtcgcgatagctctttttcaacgcggagcagacaatcagcgacactttattggtgcgctgcatagcaaaggcggcatcgttcagcgcctgcagccacggggtgcggtcgtcatcatttaacggttcgccggaagccatcttgttgatattgctgcgcggatgcagaaagtcgccgtcgagaaacgcggcgtgcagttgatgcgccacttcgctggcgacagcggatttcccgctgccggaaacgcccatcaggacatagatgtggtgatcatggttagtcgtgctcaaagcttcctcccactggacacatacgcgcagcctggcagcgtttaacggcgtggaatactggcgtacaggttaattgttacgggtaactgttatcggtaacattgtcatgccggagttgtggagaagcaataaccattcgtgccagatgtgaatatgtgtgatctacttcaaatttgtcagtttaaatagatccgcccggtgacaatgtgaaacctaaatctaacatcttaggcgtcaccgcttcaccgcgaatacgcgccagcagacgttcagcgccaatccgccccatccgctcgcgcggcgtcagcacgctggccaggcgcggctccatcacctggccgatatcgtggccgtggaaaccggcaatcgccatatcgtcagggattttaagccccagccgctggcactcaaacgccgcgccgaccgcaaggtcatcgttggtacagaaaatgccgtcaagctgcggatattcgcgacgcgcctggcgcatcagctcaatccccgatgaataagaggaagactgctcaaccatcacgctgtagggcgtcattccggcatcaagcatcgcctgctcataccccttctgtttgatgatagtacgttcatcaagacgtgcgccaagataggcaacgtgacgatggccatgattgataatcgccgcggtcatctgccgggccgcttcaaagttatcaaagccgacggcgatatcgaggcacggcgactggctgtccatcagctccacaaccgggatacccgccacttcaatcatcttcagggtgcgcggcgtatgggttcgttcggtaaggatcaggccgtcaatattccaggaaagcatggattccaggcgtttttcttccatttccggcttatagccgtagtgcgccagcatcgtctggtaaccgaaagagtcggtcacgctttcaataccgcgcagcacttctgagaaaacctggttagttaacgagggcagcagcacgccaatagcgcggctggtggcattcgagaggatgtcgggggcgcgattaggaatataacccagttcatcgagagcaacggctatcttgccacgcagcgcttcggaaacctgttccgggttacgtaagtagcgactgaccgtcattttggtcacgccgacaagatcggctacatcctgaagtacgggtcttttctttttcatcgtcctgactgcgatcaacggggaaacattttctcagtttatcacggacaaagcgcaaccttccctaacatcagggaaggttgcgcaatttatttagacccgatcggagaacgatcagacgggcggcagatcgaacagcagaatttcgctatcgccgtcggcgtgtacggaaatcgcctgctcgtcccaaatggccaggccatcgctggtggtggccttcgttccgttgatggtgacttcacctttcaccacctggatccacacccgccgttcagcggcaatctggtgcaccgactgctcgtctttcagcagcgcccagcggtacagttccatatcctggtacaccttcagcgaaccttcgcgggcatccggcgacagcaccagctgcttgccctgcgcggcgtcaaagcggcgctgttcgtagcgcggcgtgatgccatttttttccggcataatccagatctggtacagatgcagtttttccgtgttgcttgggttgtactccgagtgacgaatcccggtacccgcgctcatgatctggaactcacccgccggcacctgctctttattccccatgctgtcctggtgctcaacggccccttccagcacgtaggtcagaatttccatatctttatgcggatgggtaccgaagccctggcctgcatcaatcacgtcgtcattgatcacccgcagcgccgagaagcccatgaagttagggtcgtaatagttagcgaaagagaaagtatgccaggaatccagccagccgtggttagcgtggccgcgttcgttagctttgcgtaagtagatcatgttgcacccccgtatgttttcgatgggataagtgtggacccaatcccctggcgatcatagagggtgaaaattgactcctctgttcaaaaaatatgaacgagtacagaggagccatgagggcttatcgggtaagggtaatcgtggccggagatggctgttcaaagccgcgttcgaggatctccagattcgtgagaacgtcagattccttgacgaaatttgactgaccgttaacgagggtttcatacagcgaatcatagacccgcccatagtcgccggtttcaagcgggatctcttcccgtacggtttcgcccgcctcattgacgtactccagcagaccaaccgtctcgtccgcgccgaatcccggctcgcccggcataatattggccttcaggctggtctcctgctggtcgataccgtatttaataaacgaccctttatgaccatggacgatgaattttggatagggcagcttcaccagatggctggttttgacaatcgccttcaggttgccgtagaacagctgggcctcaaaggtatcgtccggattggccttgttgcgcaggctacggatgtcgtaagagacatggtcagggcgaccgaacagggagataatttggtccagggtatggacgcccaggccgtaaaacgtgccgtcctgaggcaggccgggtttccctccatctaccgggcgatagttgtcaaaatggttttcaatctcgacgatctcgcccagctttccgctctcaatcactttcttcgtggtcaggaagcaggagtcgaagcgacgattctggtacggcgtgaccgtcaatcccttgcttttcgccagggcgaatagcgtttttgcctcatcaagggtcggggtaaagggcttttcgaccagtacatttttgcccgcctccagcgcccttttggcataggcaaaatgactgtccgcgtgggtgcacacaatcaccagcttgacctgcggatcgttaagcacttcgtcgaggtcgctggtgaaatgaatatgcgagtatgccggtgcctgttcctctggctttgcgctgcggcgaaagatatgcgccacgtgccagcggtcttttcggtgcaggacatagggaagatggtagcgggtggtgcttttgccgaatccaataaatgcgcagtgcaaagtcataacgcggtcctttgttaggtctctgctattaaccatagcgcaagctggctgcgaacttaaccccttcaataagtgtgccaaattcttaaatgtaaaatttaacgctcaaattcattgaccctacggcctaaattctggataagagggccctcgggaaaagaacgttttttatccagcgcgtgggagcatgacgccgtatcgcgctcgccgtttcccaaaacacgatgactaaaggagtagccatctcgttcgtatggaaagcaagtatatcgccctgaatagcgcccttctcttttggctgcttggcctgatggcctggtgctgcgaatccacgtatctggcctggctatcgggctctttctccttgtcatctttcgtttttcattttcaatatcatcggattaaccatatgtttaaaaagaataaaaacgttgaagcgacgccacagacggcggctacgccggtactcaacagcgcatccccgttagccgtttcccgcaaacctgccgccacggttatcgccagcggcatccgctttgacggcaatattatcgctgagggagatgtcgatatttacggtaccgtaagcggcaatatcgacgccgaagagagccagattaagattatggccggaggcctggtcgagggaaatatcacctgccgcgagctgattatcgacggctgtatcctcggtcagtgccgcagcgagacgattgaaatcgataagaacggccaggtcaccggtacgttggcctaccgcacgctggccattaacaagggcggcgttttttccggccaggcagagctgctgcctgcggcagaaaagagcaacgtggtggggtttatcgccgataccgctattgaaaccaaagataaggttgaggcgcagtaactgccatccggggcggcggaaaaaagcaaaaaaaaagccagcacccggctggctaaagtaatactggaagcaatgtgagcaatgtcgtgctttcaggctttccgcaagggtctccctgaatgcagagcaataataatcattctcattcgcacttgtccacctctttttgcaaaaaataggcgttgctcccttttttaaagtcagcgatctttaaggggacgattaacccaaaaaggtaaatgaagaatgagcgacatagtgatacgccatgccgaagccaaagattacgacgcaatccatcagatccatgctcagccggaggtatatcacaatacgctacaggttcctcatccttccagccatatgtggcacgagcgactaaccgaccgaccgggcgtcaaacagctggtcgccagcatagatgaccaggtcgtgggacacctcgccattgaggttatccagcgcccgcgccggagccacgtcgccgatttcggcatttgcgtggattcacgatggcacaatcgcggcgttgccagtgagctgattcgcaccatgatcgacatgtgcgacaactggctccgcgttgaccgtattgagttgacggtgtttgtggataacgctcccgcggtggcggtgtatcagaaattaggctttgaaattgaagggacggggagaaagtatgccctgcgcaacggcgaatatgtcgatgcctactttatggcgcggctgaaggggtgacgctcaactaaccctctcccggcagggagagggtcggagtgagggtaaacctaataccctgccgttaaatcatccggggaacgcggatcggatgcgccgtacagcgcgccgtccgggccaaccataatactctgggtgctgcccatcgcctctttcaccgccactttctgccctttgctctccagcagcttcagcgtatccgggctaaatcccttctctacacgcagttcgtccggcagccattgatgatggaagcgcggggcgttggtggcttccgcgacgttcattccgaaatcaatggtattcaccaccatctgcaggacggtggtgatgatgcggctgccgccggggctaccggtcaccagccaggttttgccatctttcaccacaatcgttggcgacatcgacgacagcggacgttttttcggctcgacggcgttggcgtcaccgcccaccagcccgtagacgtttggcacgccgggtttagctgagaaatcatccatctgattattcagcagaatgccggagttccccgccacgatgccggttccaaaggtcgtattcagcgtataggtcacggcaacggcgttaccgtccttatccaccaccgagaaatgagtggtctgattgctttcatacggcgccagcttaccggggcgaatctggctcgacggcttcgccttattgatatcaatctgctcagcaatcgatttggcgtacgctttgctggtcagcacctgccacggcaccttgacgaagtccggatcgccaaggtattccgaacggtcggcataggcgtgcttttcagcttccgccatcacctgcatggcgtcggcgctgccgaagccgtacttatgcatatcgaagttttcgaggatattgaggatctgcacgatatgaatgcccccggacgatgggggcggcattgagaacacctgatagccgcgatactcgccgctcaccggcgtacgttcgaccgctttgtaattggccagatccgctttggtgataagcccgccgttattcttcatctcagcggcaatctggtcggcaatcgcgcctttatagaaggcatccggccccagctcggcaatcagctccaggcttttccccagctgtttttgcaccagcttatcgccctttttcagcggctcgccgtttttccagaagatagcccggctgttggcatggtcggggatcacttcgctgccgtaggttttcaggtcgtcggccagcgcatcatttaccgtgaagccctcttcggccagcttaatcgccgggcgaatcactttgttgagcggcattgtgccgtatttttccagcgcgagggagaacccggcgacggtgcccggcgtgccggaagccagatgcgaggtcagcgatttcttgctgtccgggttgccctgatcgtcgagaaacatatcccgggtggcctgttccggggccatctcgcggaagtcgatcgccgtggtattaccgtctttggtccgcagcatcataaacccgccgccgccgatattaccggcctgcggatgggtgaccgccagcgcgtagcccaccgccacggcggcatcgaccgcgttgccgccctgacgcagaatatccacgcctaccttcgttgccagcgcgtccaccgaggccaccatcccctgctgagcgcggaccgggtgaaatacatcttcctctacgccataagataccggcggaggggcgggatctgccgcgacggtaaaactgccgcccgccagcaacgcagcgatgaccacctgacgccagagcgttgtttttatcattgtcatactcctgaaatgtgttttatccccgtctatacccgtcatactccaggtcgcacggacgttggctacgctcgtttacccgaatcacttacccgagtaagctcatcggccgcattacccggcctgaggcctcgccccttacggggccagcgcaagcgctgttcaaaacggttaaccgttttgtcctgcgactcgaattattcagggtataagcctggctgataagtcctaaaagatcattgttgcgccggaaagggagtaaacttaaacgatcccacgaagtgaggagagaacaatgaaagcaatgttatatctggcggcgctgctgccgctgagcgtcatggcgcagccgatcaatatcgacaataaccccaatcagccggggtacgtggtgcccagccagcagcggatgcaaaatcagatgcagacccagcaaatgcagcagcaaaacaatcttaagcagagtattcaaagccagtcgcgcgcgcagcagcagcatcttcagacgcagttgaataacgatcggcagcgggtacagcagaataacaatctgacccgtgagcagcctctccctaacaccaacggtgggatgctgcagcgccagacgaccccgtaagggccgcctgacgcagaagcgggttacgccgggaagttggggccgatgacgtcaatcgcatcggtgcagatgctgtccacgccccaacgcagcagctcggcggcgcgctgcggtttgttaacggtatagaccagaatatgcaggccagcggccttcaggctcgccacgcgcgcttcatccagcagcttatggttgaggtgaatagagacgcagccgagacgcgcggtcagttcgcgccagtcgttgcgccactcatccagcagcagcccgcgcggcagttcgggcaccgcctcctgcgcggcttccagcgcatcaacgtcaaacgatgagagcagcggcggtgtcattccctgccacagctcacgcgccgccagcgccaccgctttgccggtcagcggcccggtgccggtggtcggtttaatttcgatattggccatcatgccgtgctgacggcagcggtcggccacctcgctcagcagcggcagcggctcgcctttgaactcgccgctgtaccagctgccggcatccacttttagcagatcgttccacgccagttcgcccgccacgccccagccgttgctggtacgttcgagattgtcatcgtgcagtaaaaaaatctgcccgtctttcgataacttagcgtcaaactcaatcatcgtatgaccgtaacgagcgccggtatcgatggccgccagggtattttccggagccagtttaccgccgccgcggtgggcgacgatatgaggataaggccagtgactcatgcgcgttgtcctgtttcactatcaaaaagatgcagactttcctgcggcagattcagccacagggtgctgcccgcctgcggacgctgctggtgcggcagccggaccaccagcttttgctcgccccagcgcccgtgggcgaggttatcggcacctaaaatttccagcgtatccatcaccagcggtacgccaccttccgcctcggagcttaatgcaaaatgttccggacggatacccagggtcatcttacgcccggcatagcggcgatgctcgctgttgatgggtaaaagcatcccgccctcaagctcgaagcggctaccgtcgtcgctgacccggccttccagcaggttcattgccgggctgccgataaagctcgccacaaagcggctggccggtttttcgtagacctcgaccggcgtaccaatctgctcggcgatgcctttattcatcaccatcacccgctgcgcgagggtcatggcttccacctgatcgtgcgtcacatacagcgaggtggttttcagccgacggtgcagctgctgcagctccagacgcatctgcacgcgcagtttggcatcgaggttggagagcggctcatcaaacaggaataccgccgggtcgcgcacgatagcccgccccatcgccacgcgctggcgctggccgccggagagttcgcgcggacggcgcttcagcaggccgtccagctccagaatgcgcgccgcttcctggacgcgttcggcaattaatcctttacctaaaccgcgaattttcaggccccacgccatattctcttccacgctcatatgcgggtagagggcgtagttctggaacaccatcgcaataccgcgatctttcggttccatttcggtgacgcgcttgcggtcgatccagatatcgccgctggtgacccgctccaggcccgccaccatgcgcagcagggttgattttccgcagcccgaggggcccaccatcacaataaattcgccgtccgcgacgtccagcgtcagcggctggatcacctgggttttgccatcccagcttttggttactgcctgtagcttaagtcctgccattttatttctcactatccactaaaccacgcacaaacgcgcgctgcatggctaaaacgatgacaaccggaggaatcagcgtgagcagcatcgccgccatcacctgattccactgcgtggtaccctggccgatggcgatcatccctttgatgcccgcgaccgccgtgccgagattcacgtcggtaatgatcagcagcggccacagatactggttccagccgtagataaaggtgatgacgaacagcgccgccaggttggttttcgacagcggcagcacgatgtcgcggaagaagcgcatcggcgacgcgccgtcgatacgtgcggcctctatcagctcgtccggcagggtcataaagaactggcggaacaggaaggtggcggtcgccgaggccatcagcggtagggtgagcccggcatagctgtcgagcattttcaggttggcgatcacttccaccgtcgggaaaatacgcacctcaaccggcagcatcagcgtgatgaagatcatccagaagaacaggttgcgcagcggaaaacgaaaccagacgatggcgaaagcggagagcatcgagaccgtaattttgcccaccgtgatgccgaaggccatgatgaagctgttgagcatcatcagccagaacggcgcgctattggcccctacgccgttcacccagataaacttcatgttttcgagcagatgcccgccgggaatcagcgtcatcggcgtatcaaaaaccgctttactgtccagcgtcgccgcgacaaaggcgacatacagcggaaacagaatgaccgcgatccctaaaatcagcatggtgtggctgaaaatcgtcagcccgcgtcgattctcaatcattggtagcgcacctttcgttcaacgtagcggaactgcaccaccgtcagaataatgacgaggaacatcagcaccaccgactgggcggcggaagcggaaaggtcgagcccggcaaaaccttcacggtagatcttataaatcagggttgttgtcgcctgaaccggcccgccgccggttgcggcatcgataaccgggaaggtatcaaagaaggcgtataccaggttcaccaccagcaggaagaagctcaccggggcgatcagcggtagcgccagcctgaagaagcggcgaaccgggccggcgccgtcaatcgcggcggcttctaccagcgagcggggaatagattgcagcgcggcgaagaagaacaggaagttgtaactaatctgcttccagaccgaggcgaaaaccacaaggaacatcgcctgaccgctgttctgcgcgtggttccagtcgtagcccatctcaccgaggagatgcgtaatcagcccgcgtccggggttgaacaagaagatccatagcaccgccgccaccgcgggcgcaacggcatagggcaggagcatcagcgtctgatagaagcggctgccgcgcaccacgtaatccaccagcgcggcgaaaaacagcgagatcagcaggccgctgacggtaaccatcgtgctgaacttaatggtggtccagaaggagtccaggtagtacgggtcctggaagagggctaaaaagttatccaggccgacaaactggctggagagcccaaacggatcgacgctctgcagtgaataccacagcgcttcgcccgcgggccagataaaaaagatgacggtgataaccagctgcggcgcgaccagcacatagggcagccaacgcgagcggaacaccggacgggatgatgacatagttaaactctgagttggtttcccctcatcccggccctctccctaaacgggcgaggataaaagacggctccgggcgatcccctctccccgacggggagagggtgaggggctggctataagattacgacctggttgactgctcgaaacggcgcagcagctgattaccgcgctcaaccgcggcgtccagcgcctgctgaggcgttttcttcccggtccatacgctttccagttcttcatctacgatggtgcgaatctgcggcatattgcccaggcgcagacctttggtgaacggcagcggcggcttgttcagcatctggcgcgtcgcgatatcggcaccggggttcttatcatagaagccctgttcgcgggtcaggttgtaagcggcggtggtaatcggcagatagccggttttctgatgccattcggcggcgttttccggcttggtcaggaaatcgaggaatttggcgacgccggtataggtttctttgtctttaccctgcatcacccacaggctggccccgccgataatggcgttttgcggcgcgcctttcacgtcggcgtcgtacggcatcatccctacgccatagttgaacttcgcgtactggcgaatatccgcaagggagccggaagaggcggtggtaatggcgcagtcgccgttatagaacttctcggtggattcgtctttacgcccgaagtagctgaagtcgcctttcttgttcagttcttcgagcagagcgatatgcttcacctgctccggcttgttgaactccagtaccgcatcggtaccgtcgaagccgttgtttttggtcgccaccggcaggccgtgccaggcgctgaagttttcaatctgaatccagccctgccagccgctggcgtagccgcatttcatcccggcagctttcagctttgcggtatatgccgccagatcctgccaggttttcggcggctgttccggatctaatccggcttttttaaaggcgtctttgttgtagtacagcaccggcgtggagctgttaaacggctgggagagcagatggccggttttggagtcggtgtaataaccggagacggttggcacgaactgcgtttcatcaaactgaatgcccgcatcgctgaacacctgatagaccggcttaatcgccttcgaggccatcatcgtcgcggtgccgacttcgtaaacctgcagaatagctggcgcgttgccggtacggaaggcggcgatgccggcgctcaggctctgctcatagttgcctttatacaccggaacaattttgtagtccgggttggctgcgttgaaacgttgcgccagtgaatcaacttctttccccaactccccttccatcgagtgccagaacgggatagtggttaccgccagggcttgtccggcaaatgccaggctgagcgccagtcctaaagctgtatgtcgtaacgatatcatcggttatctctcttgttgttccggatgcgcgatttcacgcgttttatgttcgcgggggtaacatgacatgctcgaatgacagaaaaataactattgcattacaaaaatattacaataaattggcaaaaacatgatgaaacggtgaaaaaaaagtggcagggaaatggcaaagcgaaaaagagaggcggcgcaggctacagataagcggggatctgtagttaaatagggggcgttaaacagcactctccggcgagccgtcataaggaaaaatatgaagacgcttcataaacctaccgaacgcgttttactcattctggaaaccttagccaacgcggacggaatgacgctttccgagctatcgctcaaaacggatatttcaaagggaaccattttcccgatcctcaaatcgctgcagtaccggaaatatatcagccacgacgatcgtaacggcatatatacgctggggatttcgtgcgcggttctggccagctcaacggtggaaaaagagttctggctgaaaacgatcaatagcgaaatgcacgcggtggtcaatgaatgcaatgaagtttgccagctcggcattctggatgacgcctgggtgctctatgttgataaagttcagggcgaccaaaccgtgcagctggtctctaaggtagggactcgccttccggcaatctgctctgccctgggcaaggcgctgctgcataagcaccgcgacgaagagatcctggagctctatccgcagggttttccttccgttaccgcccgcagcgtaacgaatatggctcagcttcgtcagcagctggaatgggtcgccgccaacggttatgccatggacgatcgggaaatcaacgacgataccatctgctttgccgtccccctgctgcagaaaggcattattctggcggcgatcagcgtctcattgccctcttttcgcgccagcgatgaaaaaacgcagcaggttattcacgcgttaaaagaggcaaagggtcgtatcgaaagcgtgctgaataagctgcctgatattaaaaattactgatttattcgccagcggtgccgtcggaattgtgattacccacacaataccgagatttaatgatccgccgtgacgcccgcctcttctgcataattccctatttattcattgatttaatcaattatcactacgccttttacgccatttgacttcacgtcgatggcgtgtttacttatgcttaatcgcaaatacaaacagtgtttgtatatacgaacaacaaagaggttgaatatgcaaagtcgttacatcaccccggcaataacggtttttgatgagcagggcaggctggatcctgaaggcaactttcgcctgtatgatttcattaaaagcagcgtatcgggatttgtcgtcatgggcagtaccggcgagtttttctcgctggatatgaaaacatcccgtcagataattcaaatggcggcagagttcccgcgcgagggaataaaggcctatgcgggtaccagccgcatggatattgacgagtgcgtagagctggcaaactatgcagatgagtgcgggctggatggcgtcatgattatcagcccgtggtacttccgcctgactgatgaaggcatttatacattttatagccagattgcccgccgcaccgccgccaaaatattcatctataactttccggagcgcaccggctattccgtctcgccggaggtctgtttacgactcgccagcgagttcccaaacattatcggtcttaaagacaccattccggacaccaatcacacgtcgcaggtgattcgccaggtaaaatctgaagtaccgtattttgaagtctatgccggttatgacaataacttcgcgcacaatgtcctggcggggggcgatggatgtattggcgggttatccaatatttgccctgaaatattccgcgactggatgcaggcatttaacgataacgatgtgcagcaaatttcgcggtatcagcaaaaagtggatgggttaatggatatttacgcggttaacgatccgttcattccaacatttaaaaaagcgttacagctgcgcggaattattcagtccgaccgctgcacgccaccgtttagctcgctcgccacctgccagaccgaaagtattctgcggatactttcccgcgctggtattgaaattaatgcctgacccccacgcggaggtattatgaaaaccatcacagcttacgacaatccggccctcaattccgcgattaccaaatcatggaagcgcctggtgccactgatgtttattttgtacttcatcgcctttatcgacagggtgaacgtgggattcgccaaagaggcgatgcaggtggatattgggctctccaattccgccttcgccctcggcgcggggatctttttcgccgcctatgcgctgtttggtattcccgctaacctgattctgaataaaatcggcgcgcaaaaatggttaagcatcaccaccgcgctgtggggcgttctctctgccctcaccggactggtgcagacggaaacccagtttattgttctgcgctttttactggggttaggcgaagccggtttttatcccggtattctgctgctggcctccatctactttcccaataaagttcgcgcctccgtcgtcggtatcttcgtgctcggcgttccgctggcattaaccttaggctcgcccatctccggggcgcttctggaaatgcacggcttcctcggcaaacccggctggttctggatgttctttatcgaaggcattccggcggtcatcatggggatcttcgcctggttctggcttgatgatacgccggccaaagcgcgattcctgaacgacgaagagaaaaaggcgctgattgctcagcttcagcaggagcagcggcagacggaaaccagcagcgtcggcaccgccctgaaaagcctgaaagtctggcacctggcgctgatctacggcaccatccagatcagcgtttacgggctgatgttcttcctgccttcgcaagtcgcctcgctaatgggctccacgctcggctttaaggagtcgctggtcgccgccattccgtgggcctgctccgccgtcggcgtctattacattccgcgtctggcggacaaaatgccggcccgtcgggtgctgatttcagtcatctgtatgctggcggcggcgctggggctgtttgtttctgcctggtccggcccggtactcgccattgccgcgctctcgctgtcggccatcggctttctctccgtgcaacctatcttctggactttcccggcgcagattgtgtcaggctcggcgctggccgccagtatcggcttttgcaccaccatgggcgcattttgcagcttcctcgcgccgctgattcgcgttgaggtcgatgcctttttcggcaacgattcggcgggtctggtcgccctgtcgctcatcaccgtctgctgcgcgctgctgattgccgcccttgccggcagaaaagcgacaaacggcgtcgcggtcccccatcactaagtcctgatgcgcttataacaaaggataatgaacatgcagaccatcttaaaaattgaccctaccgataacctgatcgttgcgctgcaggacttacgcaaagagcagcgggttcactggaacgatgaagcctacgttctgcgtagcgatgtcaaagccaaacataaattcgccaccgaagatattgcgcccggcgatatcgtgtcgctgtacggcgtaccggtcggcaaagcgacgcgccccatcacccgcggcgaagccattaccactgagaatatcaaacactacgcggccccggtttcgcttgacgacgtcgcgccctatgactggcagcagccggatgtttccgcctggcagcagcggactttcaaggggatcgtgcgcgaagacggccgggtcgccaccgcgaactactggctggtcattccgctggtattctgtgaaaaccgcaacgttcagcgcgtcaccgatgcgctgaacgacgccctcggctacgccaataacggcctgaaaaattttgctcgccaggtgacgtcggcaggggcattaaacgataaccggcatctgcccttcccgcatcttgacggcatccgctgtattaccgtcaattccggctgcggcggcgccacctcggacagcatgacgatgtgcgacgtgctggccgcctattccgatcatcctaacgttcttggcgtgacggtcttcgccctcggctgtgaaaaagcgcgaattgttgatttcaacgccgcgctggcgaagcgcaacccgaatttcaacaaaccgattatttacttcaggcagcaggactggagtagcgaagaaaaaatgatgcaggatgcgttgaccgaaacctataacgcgatccgcgaagcccccgtcgccgagcggcaggacgtcccgctctcccacctcaaaatcggcgtcaagtgcggcgcttctgacgggttctcggggatcagcgctaacccggcgatgggcgaagtgtcggatcgtcttgtcgccctcggcggcgcgtcggggctggcggaattccccgagctgtgcggcgcggaaggggatatcgtgcaacgctgcgcgacccgcgagctgaaagagaagtttttgtcgctgatgaaaaactatgagcatgtcgcgaacttcttcggcaccaccatcgccgataaccccagcccgggaaacattgccgatgggctgatcactgacgcgataaaatccgccggcgcggcgaaaaaaggcggcagagcgccggtaagcgcggtatgcgactacgccgaaccgatgggagaaagcggcctttcgctggtctgcacgccgggcaacgatgtggacgcggtaacgggcctggtcgcggcggggtgcaacgtggtgatcttctcaaccgggttgggtacgccgacggggaaccctatcgttccggtgcttaaggtttcaaccaactccgcgctggcgaaaaagatgccggatattatcgattatgactgcgggccgattatcgaaggcacgccgctggcggacatcgccgacggcctgtttgagaaaatcatcgctaccgccagtgggacctggcgcaccaaagcggatgcgctcgaacagtatgattttatgctgtggaaacgctctctggagctgtaggaatcaagtaaaacgcccggcatctgccgggcgttttgtcttcgctacccgcccagataggcgctgcgtaccgcttcattcgccagcagcgcgtcgccggtatcctcaagcaccacgtgaccgttttccagcacgtagccgcggtctgccagcttcagcgcctggttggcgttctgctcgacgagaaagatagtcattccctgctcgcgcagctgttcgatggtatcgaagatttgctgaatgataatcggcgccagaccgagcgaaggctcatccagcagcagcaggcgcggctggctcatcagcgcgcgcccgatagccagcatctgctgctcgccgccggacatggtgcccgcccgctgaacccggcgctcatgcaggcgcggaaacagctcatacacccatttgatgcgggtctggaactggtcgcggtcggcaaaaaaaccgcccatcgccaggttctcttccaccgtcatccgcgagaaaacgcggcgcccttccggcacgatcgccaccgcttcgcgcatgattttcgccgtctgccagtcggtaatatctttaccgtcgaaaaccacgcggccgctggaggcgcgcgggtcgccgcacagggtacccagtagcgtggttttccccgcgccgttggcgccaatcagggtgacaatctctccctgattgatatgcagactgacgttgtgcagcgcctggattttgccgtaatgcgcgctgacgttgtcaaaagataacatcactttttccatcttatgcgtcaccaccattatgcttcacctaaataggcgcggatcacgtccgggttgttgcggatctcttccggcgtaccgttggccagcggcgtgccctggtttaccacgtaaatacggtcggaaatgcccatcaccagcttcatatcgtgctcaatcagcaggatggtggtgttgtgatggctgcgcagctcgacgatcagctcgtccagctctttggtctctttcgggtttagccccgccgcgggctcatccagcatcaggatttccggctgggtcaccatacagcgggcaatctccagacggcgctggtcgccgtaggccaggttactggcctgccggttggcgtgctcaagcaggccaatacgttcaagccaggtcgcggcgcggtccagcgcttcgctctgggcgcggcggaaggacggcgtcttcagcaggccggagaaaaccccggttttcagctgctgatgctgcgccaccagcaggttttcaatcaccgtcatttcgcggaacagacgcacgtgctggaacgttcgcactacgcccatacgggcaatctgctggcccggcagcccttccagatgctggtcgcgcagcataatggtaccgccggttggcttatagaaaccggtcagacagttaaaaacggtggttttgcccgcgccgttagggccgataagcgaaacgatttcccgctcacgcagctccagcgacacgttgttgaccgccagcaggccgccaaaacgcatcatcagaccgtttacggataataatggctgactcatgcctgctctccttctttggcctgcccatttttcagcttcagctgcggacgggtcatcggcagaagcccctgcggacgccagatcatcatcagtaccatcagcgcacccagcatcagcatgctgtattcattgaaatcacgcatcagctcgcgcgaaacgaccagcagaaccgccgccaggatcaccgcgaactgggagcccataccgccgagaaccacaatcgccagcacaaaggccgactcggcgaaggtaaaggattccgggctgacgaagccctgacgggcggcgaacagggtgccggcaaaaccggcaaacgcggcgctgatggtaaaggcggtcagcttgatgcgcgtcgggctgaggcccagcgagcggcaggcaatctcatcttcgcgcagcgcttcccacgcgcggcccagcggcatacgcagcaggcggttaatcacgaacaggcttaacaccaccagcagcagagcgaccaggtagaggaaaatcacgcgatcggagggatcgtacttcacgccgaagaagttgctgaacgtatcccagccgccttcgcgggcgctgcggctaaattcaaggccgaacagcgtcggtttcgggatctggctgatgccgttcgggccaccggttatttcggtgttgttaagcagcaggatgcgcacgatttcgccaaagccaagcgtgacaatcgccagatagtcgccgcgcaggcgcaggaccgggaagccaagcaggaagcccgccgccgccgaaaccagccccgccagcggcaggcaggtccagaagcccagaccgtaatagtggttcagcagcgcgaaggtataggcgccgatggcgtagaaaccgccgtagcccagcaccagcaggccggaaagccccaccaccacgttaaggcccaggccgaggatgatatagatcatcgtcagggtagcgatatccaccgttccgcgcgacaccataaacggccacgccacggcgataaccagcagggcgatcaggaacagcttctgttttaccgtcgaaccgtcgatagccggcagaataaacttcggcccggagacgttcttcatggttttctggaaaacgggacgcagcagctggaagaagaagaccactgcggttccgataaagatccactgccagcggatatcggcggcggtatccaccaccagcttcgtgccgtccagctccagctgcacgcccataaagacgcccgccaggataaagaacatcaccgcggacagcagcgccatcgcaaaatgcatcggtttcatactttttctacctccggacggcccaggataccggtaggcatcaccagcagaaccaggatcagcagcgcgaaggagaccacgtctttatattccgtactgagataggcagaagagagcgcttcggcgataccgaggatcagcccgccgatcatcgccccgggaatgctgccgatgccgcccaacaccgcggcggtgaaggccttcatcccggccataaagccgatgtacgggttgattacgccgtagaactggccgagcagaacgccggcaaccgccgccattgccgcgccgatcacaaacgtcagcgcaatcacccggtcggtgttgatgccgagcaggctggccattttcaggtcttcagcgcaggcgcggcaggcgcgccccatgcgggaatagcggataaacagcgtcagcgccagcatggcgataaacgtcacgacccagataaccagctgcatggtggtgatagtggcggtgaagttatcgctgctgcctaccgtccactggccgttgaacaggctcggcagcgcgacatcgcgcgaaccttccgtcaggctgacgtagttttgcaggaagatggacatcccgatggcggagatcagcgcaatcaggcgttttgagctgcgcaccggccggtaggccacgcgttcgatactccagccgtaggcgctggcaatcacgatagcgccgacgaatccggcggcaaccagcagccagctggtatcgatacccatcatcatcagggcggcaatgatcatgaaggagacgtagctgccaatcatatagacctcgccgtgggcgaagttgatcataccgataatgccgtacaccatggtatagccgatggcaatcagcgcataggtgcttcccagcgtgacgccgttaaacatctgctgcagaaaatagagaaactgctcggacataaggtaacctttttctacccgcccgctttgcacgggcggtgggataacttgtcttatggcttatttcgcgagggtggatgacccgtccgcgtgccactggaagacaccaaattcaaatcccttcaaatcgcctttttcgtcccaattcagcggcccaattacggttttcgcgccgtgagcttttagatctttgattaaatccagcggctcctggcttccggcccggtccatcgcctgcgccagcgactgcacggcggcgtaggtgatccagacatacggaccactcgggtctttcttctcggctttgagcgcgtcaacgatagcgctgttggccgggtcctggtcatagcgttttggcatcgtcaccagcatgccttccgccgcatcgcccgcgatgttggacagcgacgcgttacccacgccttccgggcccataaacacggttttcaggcccacggagcgcgcctggcgcagcatctggcccatttccgggtagtagccgccgtagtaaacgaagtcgatattctcttttttcaggcgcgccagcagcgcggagaagtctttttcaccggcggtaatgccgtcgaagaagacgatattcgcgccgccttttttcaggctctcctggacagaacgcgccagaccttcgccgtactgctgcttatcatgaatgatagcaatacgctgcggcttgacggtttccatgatgtattttgcggcggttggcccctgcgaagagtccagaccggcggtacgcatgatgtactgatagccgcgctgggtcagctccgggttggtcgcgcccggggagatcatcagaatgccttcatcttcatagatatcggatgccggctgggtggaagaagagcagaggtggccgataacgtactgaatgccgtcattgacgattttgttcgccaccgcaacggcctgtttcgggtcgcaggcgtcatcgtactccacggcaaccagcttatcgcccttgatgccgccctgggcattaatatctttgatcgcctggcgcgcgccgttgaattccatatcgccccactgggctaccgggccagacatcgcgccaacaacggcgaccttaatatctttggcaaaagccgcctgggacatcgccagtgcgactaaccccgcgataaccgttttcgcgttccttttcatgctgcagaaccccgttcgtgatgtggtgtaaatattttgtatttttatggttaaaaagcattctgtacttttattaaacaacgctacttttaccattatctttaatggtttagcgaggttttttgcctgaatacagagtaaaatctctatttttcaggcgattaagcaaagataatattctgtatttgctggaagataaacaaaaaaagtccagtaaacagcataaaataacgacacataaggcggaataaaacgctacatatcaggttaaaattctgcttatttttcgatccatgatgaattgctctaccctgctccttccaggaaaacgaatcccctgatgaacaggcaaaaaacggcgctccgcctggcagggaatttggatacactaacgcctctgttttgactggaccctcgcgtatgaaactgaccattattcgtttacagcacttcagcgatcaggatcgcatcgacttaggtaaaatctggccgtcgcaggatcttgcggcgctggctctggatgaaagccatcgtatttatgccgcccgcttcaatgagcgcctgctggccgcggttcgcgtaacgctaaacggcgttgagggcgaactcagcgcgctgtgcgtgcgtgaagtgacccgccgtcgcggcgtcggacaatatttagtggaagaggtgctaagggataatccagagatcggcagctggcacatcgcggatgccgacgtggaagaccgcggcgtgatggcggcgtttatgcaggcgctgggctttaacgcgcaaaccggcggttgggtaaaaaagcaataaatcggcgaaagaaggctgaacattcccggattgcggcgtaacgccttacccgggctacaaaaaaccagaccgcaccagcctgtagcccgggtaagcgcagcgcgacccgggaagaaaccgcatcaatgcatcaactccggcgcattccccgggttgcggcgtaacgccttacccgggctacaaaaaaccagaccgcaccagcctgtagcccgggtaagcgcagcgcgacccgggaagaaaccgcaccaatgcatcaaccccggcgcattccccgggttgcggcgtaacgccttacccgggctacaaaaaaccagaccgcaccagcctgtagcccgggtaagcgcagcgcgacccgggaagaaaccgcaccaatgcatcaactccggcgcattccccgggttgcggcgtaacgccttacccgggctacaaaaaaccagaccgcaccagcctgtagcccgggtaagcgcagcgcgacccgggaagaaaccgcaccaatgcatcaactccggcgcattccccgggttgcggcgtaacgccttacccgggctaccgactaaaaaaggcaacttacgttgcctttttgcttttacctttctcctcgcctatgcgaagaggcaaggatcaactgatttaaccaagaatttcgcgttgcagaaaggcgtcaagacccgaaatccccgggagcttacatcggtaagtgaccggggttgaggggcgcagacaacgcatctgcggcgtgaaaggcgcaggttaaattatttggcgtcggtcgccgtaccattagcatgccaggtaaacacgccgaactcgaagcccttcagatcgcccttctcgttccaggtgagcggccccattacggtgtcgaccgttgcgcccttcaggtatttagcgatttcagccggatcttctgactgattcaggcccgcttccagcgactgcagcgcggcataggtggtccacacgaacgcgccgcttggatcctgtttcttcgctttgatcgcatccacaatcggtttgttcgccggaacctggtcgtagtttttcggcttggtgaccagcataccttccgcagaagcgcccgcgatattagacagggacacgttcgctaccccttccggccccataaactgcgttttcaggccagcggcgcgagactgacgcaggatctgccccatctccgggtggtagccgccgtagtagacgaagtcgatattctctttcttcagacgcgccaccagggtagagaagtctttctcaccggcggtgataccgtcaaagaacaccacgttagcgccgcccttcttcaggttatcctgtaccgcgcgggccaggccctcgccatactgctgtttgtcgtggacaatcgcgatgcgctgcggcttcactttttccaggatgtatttggcagcggttggcccctgatcggagtccagaccggtggtgcgcagaatcagatgatagccgcgagccgtcagctccggcgcggtggccgccggggtgatcatcagcacgccttcatcttcatagatatcagacgccggctgggtggaagaagagcacaggtggccgataacgtatttgataccgtcgttaatcactttgttagcgacggcaaccgcttgtttcgggtcacaggcgtcgtcgtattttaccatctgcagcttattgcctttgataccgcctttggcgttgatatcggcaatggcctgctctgcgccagtaaactcctggtcaccgtactgcgctaccggaccggacatcgcgccaacaacggcgactttgatatcttcggccattgccgcaccgctcatgattaaggcaatacatcctgccagtaacgctttacccttcatattcatcctgaggctccccattattatggtttttgcatttgttgtgatgttgtttattagcgcattattctaattagacacataagaaaagcatatgatagttagattagggtctgccgcctgcgcttttgcagcacactatgctaaacataccgtcattcaggagaattggaaacgataaaattgcggagtatgtaacagataagtgacaaataaaaacccgcgccggaataaaccgaacgcgggggcatgagcaacgcgactaccagcccgcaggcaggtagccaaaggccgaagcgatggcgtaggcggcgctgcaaagatagagcaatacgatgaagatctggattaagggatgcgtgattagcgccgggcaggtccagccgggggtgatgtcaccctgccgacgcgagcctttgaggatcaggatcggcatgatagataaaatcaccccgctaaatactccggcaaaatagagcgcgttcacgaaggataccatcccgctataggccagaataaaaggcggcacggcgaccactaacagcaccttaaagcgtttgaacggctgctcgtcgttacccaggcgaaactgatcgaaaatattggtcaggaagcttccgcccaacccccaataggaggtcagcatcgcgcagagcgcaaaaagatttgccgagaagaaagcccactcgccgagcgccctgccccaggaaatggttgccacatcagaaatattatccagcccgcttaatgcaatcaccgaaagcgggaccagcgccagcaggcaaaaggttaataacatccccaccataatggccttcggcagcttctccggtttatcggcgaagccgcgcgccatctccggcacgatatactgcgcggagaaacaaaacgcgacaacgttaaataccggcaccatatacagccagttgccgtccagcaaataaccgacgctggcggtctctttcagcaacgtcgcggcaaccaaaatggttatcataacgaccatgccgatactgatgaatttctcaccccggccaatcgccttcagcccaagataaagcaccccggccgccggaataaaaaacagcgcgctgcccagggccggcgagatgccgaataacgaatgcaggagtttaccgctgccggtcatataagccgtcagcgcgccgacgctgttgacgcaaacggagaggaacatcatcaacgcgccaaagcggccgacgtagcgctgcgacaggccgctaagctgcagatgcttacgcgtgcgcagcgtcgattccgccacgtagagcatggtgatggtcgtcaggctaccgaccacaatcagccaaaacagcagcggcagaaagcccgctttgctggaggcataggcgatggatagcaccccagcgccgatattggtgccgacgatcatcgacacgccttcaatgaaactgagggattttgcaggtacagcggtacgctcccggctcgtcagagccggagaaaaggtggagttgtcagacataatattttccgttttattccggcagcgtgcgccgccggaaaaaaggtgatatcagggtgaaataccactcacgctgagcatgaataaccagactgcggcttcctgtttctgttgggcttccctgccgccgcaactggatgtaagactgactagcccttcagcacgcgggccagaatatccagcgctttcgtaaactgcgcatccagaatcgttaacggatagaggaagcgaatgacgttgccatagacgccgcagctcagcagcagcaggccgttctcctgggcttgttgctggatttgacgggtgatctccgccgacggctcgccggtttgcggatcgttaaactctaccgccaccatcgacccctggccgcgtacgtcagcaatcgccgggcagctttgacgcgcctgattcagcacctctttcagatggctgcctaagcgctcagcgcgctggcacagctgttcttcttcaatcacgtccagcaccgcgtgcgccgccgcgaccgccagcgggttaccggcataggtgccgcccagaccgcccggcgcaggcgcatccatcacctcggcgcgacctaccacgccggagagcgggaaaccgccggccaggcttttggccatcgtcatcaggtcaggcttcacatcatagtgctgcatcgcaaatagcttgccggtgcgcgcaaagccggtttgtacttcatcggcaatcagcagaatgccgtgggtatcgcacagcgcgcgcagcgcctgcataaactcaggcggggcaacgttaaagccgccttccccctgaatcggctccagcacaatcgccgccacctgatcggccgcgatatccgctttgaaaatgcgctccaggctcttcatcgcgtcggcggtggtaatgccatgggcggcgttagggtagacggcgtgataaaccgagcccgggaacgggccgaaaccaatcttgtaaggcgccactttgccggtcagcgccatggtcataaacgtacggccgtggaagccgccgccgaaggtaatcaaccccggacgaccggtataagcgcgcgcgattttcaccgcgttttcaacggcttccgccccggtggtaaagaacgccgtttttgccggaccgtcaatcggcgccagttcgttaatccgctcggccagcgtgacatagctttcgtacgggacaatctggtaagccgtgtgggtaaaggcctgcagctgctgttcaacggcggcaacgattttggggtggcgatggccggtattcagcaccgcgatgccggcggcgaaatcgatcacctcattcccttcaatatcccacagcgtagcgttctccgctttctcaacaaagtagctgcacatcacccctacgccgcgcggagtcgcctgctggcgacgctgattcagttctgaacttttcaccgagaatctcctgtcatgtgtgtcacgttatcgcaacaaatccgaaactatgtcgtttatttacacaggatttggccctataatcgagtaccaattcagattatctgagggatccaattgcgttcgcttatcgcagacctggtgctggtcagattgcagaaagaaaccgacccgctcctgcacaagcgcctttacaaggcgattcgccacgccattctggatggttctctcccgccccatagccgcctgcccccttcacgggatctggcgggagagctgagaatgtcgcgcaacacaattttaacagtttacgaacaattgctggctgaggggtacgtcgtgtcccgtcgcggcagcggaacattcgtcgcgaaaacgctgcccgatatgtttcttcccgccagcagcgccagtgaaagcagccctgcgccagcagccagcgcgcccatctcccggcgcggccagcatctgctggggcacatcagcgccagtccgcgtcagtggggggcgtttatccccggcgtaccggacgtcaatgcgtttccccacccgctgttcagtaaaatccaggcgcgtatcagccgccgtccaaaacccgaacagctcagctatagctgtaacggcggaacggccgagctgcagcacacgttggtggactatctgagagtagcgcgcggcgttcagtgccaggcagatcaaattcttatcactgaagggatccatcaggctatcgacctgatcacccgcatgctgtgcgaccgcggcgatctcgcctgggtggaggagccgtcctactggggcattcgccatgtgctggcgatgaatgaagtgcgggccgagcccgtagtggttgatgccagcggcctgtgtccgcccgaaagcatagccgaagcgccgcggctgatcttcgttacgccatcccatcagtacccccttggcgcggtaatgagccttgagcgccgacagcgcctgctcaccctggcccatcagcacggtagttggattgtggaagatgattacgacagcgagtttcgcttttccggccagccgatcccggcgctacagggcttagtccccgaagcgccggtggtctacgtcggtacgttcagtaaaacactctacccggggctgcggttgggctacgtcgtgctgcctcgcccgctggcggctgaactcaaaaacgcccacgccgagctctaccgcggcggccattcgcttattcagctggcgctggcggaatttatcaacgccggtcattactcggcgcatattcgccgcatgcgcctgctctacagccgccgtcgcgtctttttgaccgagctgattcagcggcactgcgggccgcacgcgctgtcggacttcagcgataatgccggactgcatttgatcctgaatttgccggatgaggcggatgacgtggcgattgcccgcgatgccaacgcgcgccatattttagtgcgtccgctgtcgcgctattacctgacggcgcagcggaagaaagggctgttgatgggttttgcttcgcagccggaaacgcagatggaaccggcgttcaacgtcctgcttgagtgtctgaaaatgcactgcccgcaggcgctggcggaggcagaaaaacaaaacgccccatcgtaatgtggggcgttatcgggggactggcgctcagattaggcttcgatagcggcgcgcagttttttcatggcgttcttttcaagctgacgtacacgttcagccgacacgccgtagcggtctgccagctcctgcagcgtggacttgttgtcttcgtccagccagcgggcgcggatgatgtcctggctacgttcgtcaagaccctgcatcgcgtcggtcagcttgtttgccgcctgctcttcccagttatcgtcttcaatgccgtcggcaaagttagacgttttatcctgcagatagagcaccggcgccatcggctggctatcggactcatcatccgacgacatgtcgaaggtcatgtcctgcgccgccatacgtgactccatctcacgcacgtctttgctcgacacgcccagctcgcgggccaccatttcgacttcatcctggttaaaccagcccagacgctgcttggttttgcgcaggttaaagaacagcttacgctgtgctttcgtggtcgcgaccttcacgatacgccagttacgcagcacgtattcatgaatttccgctttgatccagtgcacggcgaaggaaaccagacgcacgcccacttccgggttaaaacggcgcacggctttcatcaggccaatgttgccttcctgaatcagatccgcctgcggcaggccatagcccgagtagttacgagcaatatgaacaacaaagcgcaggtgagacaggatcagctttttcgctgcttccagatcgccctggtaatgcagcttttcagcaagctcccgctcttcatcagccgataacatcggccaagtgttagcagcccggatgtacgattccaggttaccaacgggggctaaggctaaagtttgcatatctttggtcattcaaatcctctcaatcgatatcttctggcatctttctgtcctcacaacggagcaacaaacatgccagcattgatgagcaacgagaatatcactcacattagtatcagacagtgattttatccacaagttccatgcaatgatgtgaatagattacgcacaaaatgtgacatggttatgaagtttagggaagcgtcgacagggactctttccctgcagagagatattcagtgcagggaaagattataccagatttttactactcgggagtaaagtgacgtaaatgttgaacggttgccagccaggcggcgacccagccaatcatcgagcaaacaatcagcatcagcaggcactcgtcaaagcctaagccgctgagttcaaactgcgtgccgaagactttcgccacttcggtgaccgccgacgacaggcgcatgaccataatttccgacaggatcagcgacagaaacgcgccggagaaccccagcagcgccccgccgtaaaggaacggacgcagaataaagccatcggtcgcgccaatcagtttctgcacgttaatggtatcgcggcgggcgaagatgctcagacgcacgctgttgccgatcaccaggaagaccgccgccaccatcagtacgccgatcatcgccgaaacgcgtccgaccagcccggtcagcgacgagagccgcgcaaaccagctgtcatccatacgcacttcatcaacgccctgcacgtggctcacgcggtcgcgcagcgtgttcagcgcttcaacgctctggaaatcaatcttcggcaccacgatcgccaccgccggcagcgggttctcttccagcatatccagcgcgccgccgaagcctgaccagttgcggaattcgccaagggcttcatcgcgcgacagatagttaaccttctcgacgccctgctccgcctgcagctggccgactacccgcgcagcggcgtcgtcatccagcgttttttccagatagacggtgatttgcggcgtgggataatactgcgacgccgcggtgctgacgtttttgtagaccatgtagcacacgcttggcagggtcaatgaaatggcgatcaccatcaccgtcagaaacgtcgccagcggcgtgcttttcagatcctgtagcgcgccgtgccaggcgtagcgcacctgttcattgaatacgttgctcttgcgggaagccggattcggcgccgcttttggccgcttcgacgcattgcgcccgccgctaccgcccgctccgcccgcattgcggaaacggtcgaatcgattgccgaatcggcgaatgtggttcattgcctcgcgcttattcaccgatgtggcctccatgcatatgcccctcgctgagggacaggacgcggtacggacgactggagataagccccaggtcatgcgtcgccatcagcaccgtcaccccaacgcggttaaactcttcaaacagacgtaagatcccttccgacagcgcctcgtcgaggttaccggtcggttcatccgccagcaggaccgcaggtttgttcaccaccgcgcgggcgatgcccacgcgctgttgttccccgcctgaaagctgaatcggcaggtttttcgctttgtccagcagcccgactttatccagcgccgccgagacgcgacgacggatgtcatccccgctggcgccggcgataatcagcgggatcgctacattatcgtaaacggttcggtccatcagcagatggtggtcctggaaaatcatgccaatctgacggcgcaaaaacggcacctcgcggctcttcaggcggctaatatcatggccgccgaaaaggattttgccggcgctgggccgttcgataccgcagataagcttcagcagggtacttttccccgcgccggaatggccggtcagaaacgccatctcgcccgcctgcagatggaaagtcaccccctgcagcgcttgtctcccaccgagataggctttgctgacttgttcaaagcgaatcatttttaatcctctcgggcaaaaagtgcctcaataaagtcgcccgcattaaacggacgcagatcttcaatacgttcgccaacaccgatgtagcgaatcggaataccgaactgatcggcaaccgagaagataaccccgcccttggcggtcccatccagcttagtcaaggtaataccggtcagtccaaccgcctcatggaacagtttggcctggctaatcgcgttctgcccggtgctggcgtcaatggtcagcataacttcatgcggcgcatcgacatcgagttttttcatgacgcggacaatcttcttcagctcttccatcaggtgcgatttattctgcagacgacccgcggtatcggcaatcaggacgtcaatattgcgcgccttcgccgcctggatggcgtcgaaaatgaccgatgccgaatccgcgccggtgtgctgggcaatcaccggaatattgttgcgctgcccccaaacctggagctgctcaaccgccgccgcgcggaaggtatcccccgccgccagcatcaccgacttgccctgctgctcgaactgacgcgccagcttgccgatggtggtggttttaccgacgccgttgacgccgaccatcagaatcacaaacggcgttttgccttctacgttcagcggctcatccactttcgccagaatatcgcccatctcttctttcagcaggccgtacagcgcctcggcgtcgcgcagctgcttgcggctggcgtcgttggtaagacgcgtgatgatcttacgcgtggtttccacgccgacatcggcaatcagcagctgctcttccagctcttcaaacagatcatcgtcgattttcttaccgcggaacagactgataaatccggaaccgaggttctgtttggtttttaccaggctgcgtttgaggcgggcgaagaaaccttctttggtcggtttttcctgctctaacggcgtcacgacggtttcgtccggcaccacttcaacggcgttttctgccgcatcggccgccgccagagcctgtgcttccagctcttcatcggtgatatcggcctcagcctcttctaccgtttcgtctggttccggctggtcaacggcggtttcttcaagaactgccgtttccggttcggtaatgacctcttccggcgtctgttcagcgacggcttcagccactaccggctcggcgatgacctcttccaccagcggctcagcgaccgtctcttcaaccgcgggctgctccgctatctcctcaaccgccggggattcgacaaccgcctgcggctgttcgctctccacaacctgctcggtcacctcaaccacctcggcggcaaaggcttcggcatcctgtttctctgtcgcagtggcgtcgaccgtttccggcgcaaccgcaggcgcttcgctttcctgagccggttcttcaacctcttgctgggcttctactttttgttctgtttcgctttcctgcgcctgttctttttgaccaaagcccagccaggaaaagaagccacgttttttgtctttcgccatttgcgactacactcctcgctgttaattcatggcacagcttcggccagtaggtagcggaagctgaaaaatgatgaaattagtcggatagtctaccacttaacttaactcgcatcaccgcccccggattaaggtttcgtcaaccgccgccgatcgttagaatagcagcccggaagttgagacttgagcaaagagatgaagaaaccaaaccacgcgggcagcggccagatccgtattatcggcgggcaatggcggggccgtaaactcccggtgccggagagcccgggtctgcgcccgaccaccgaccgggtgcgcgaaacgctatttaactggctggcgccgtcgatcgttgacgcgaactgcctcgactgcttcgccggcagcggcgcgctgggccttgaagccctctcccgctatgcggccagcgccacgctgctggaaatggaacgcggcgtcgcgcagcagctgcaaaaaaatctggcgaccctcaaagccagcaacgctaaagtggtcaataccaatactttagcgtttcttgctcaggcgggcacgccgcatcacatcgtgtttgtcgatcccccgtttcgtaaaggactgcttgaagagacgctaaagctgctggaaaacaacggctggcttagcgatgaagcgcttgtctacattgagagtgaagtcgaaaacggtttaccgccggtgccgatgaactggcacgtctatcgtgaaaaagtggccggacaagtcgcctaccgtctctatcaacgtgaggcccaaggagaaaaccatgctgattaattttggccgcttgctgatgctgtgcgtgtgggcgtttttattgctgaacctgtttcaaccgttcccaaaaccgctgaacatcttcgttaacgtagcgctgatctttatgattctgatgcacggcctgcagctgacgctgctcaaggcgacgcagacgaaagagatgccgccgctggggcgcttcgagcagattcgtattttcatcttcggcgtgttcgaactggtcgcctggcagaaaaagctcaaggcgaccctgaagaagaagtaatgccaggaaaaggttcaggggtctggcgtaaagcccataaaccgcgaacctttatagctcaggacgcccttatcgccgacgcttagcgcatgatactgcggcgcctgcagacgaaaaaccacttccagcccgccgctttccggcctgaagcttgcttcataacgcatttcgctgccggcaggcgtcaccgtctgctggcgcgaacggcgatcgttaatcaccttctcccgcttattgctcaccaccacccgtttttgcaacagcggcgcggcatcgttatccattttttcccgacgctgctgcacatagcgatacgacgcggcaaccgcaatgatggcaacggcaaccataaaaaacagcggaactttactcattcaccttgcccccaggaattatcaggaataagcatactgtggcttgattatcattgtcatcttcctctgcaaaccactacactgagattcagtactgtaagtacaatcacttacgtaatgataacagatacagggacttactatgctttggtcatttattgctgtctgtttctccgcatggctttacgtcgatgcgtcctatcgtgggcctgcctggcgtcgctgggtgtttaaacccgtcacgctgatcctgcttctgttactggcctggcaagcgccgatgtttaacgccatcagctatctggtgctggccgggctttgcgcctcgctggtcggcgatgcgctgaccctgctgccgcggcagcgggtaatgtacgccgtgggggcgttctttctctcgcatctgctctacaccatctggtttgccagccagctgacgctatctttcttctggccgctgccgctggtgctgctgatcctcggcgcgctgctgctggcgattatctggacgcgtctggaagagatgcggatgccggtgtttacctttatcgcgatgacgctggtgatggtctggctggccggtgagctgtggttcgcccgcccgacggataccgccctgtccggcttcgctggcgcggcatccctgctgctcggcaacgcggtctggctcatcagccattatcgccgccgcttccgcgctgacaacgcgatctcctcagcattttacttcgccgggcacttcctgatcgtccgcgcgctctatttgtaattaagcgcttgactctggagtcgactccagagtgtatcctgcgggtaatgagaaaattatcattacccggagggtcctatgtcggctccagaatcgcaggataaaaaagtcccacacttctcatcgttaaaatttacccctgccgcgcagcctgcggaaagctgctgcgcggaccccgcctgcagcagcgaaaccgccgctgaaaacgatgcgctgagtcacgcgcgctttagctggctggtagaaggcatggactgcgcggcctgcgcccgcaaggtcgaaaccgccgttcgccaggtgccgggggtcagccaggtgcaggtactgttcgccaccgaaaagctgctggtcaacgccgagggcaatgtccgtccgcagatcgaaagcgccgtgcgcgccgcgggctatcagctgcgtgatgaaaacgcgccacgggcagaggagcccacctcttggctgcgcgagaatctgccgctcctcaccctcgtcgccatgatggcgctcagctgggggctggagcagttcagcccgcctctgggcgaaatcgccttcatcgcaaccacgctggtcggcctgtggccggtcgcccggcaagcaatacgcctgatcaaaagcggaagctggttcgccattgaaaccctgatgagcgtcgcagccatcggcgcgctgtttatcggcgccaccgccgaagcggcgatggtcctgctgctgttcttaatcggcgaacgtcttgagggctgggccgccagccgcgcgcggcaaggcgtcagcgccttgatggcgctgaaacccgacacggcaatccgcgtgcgcgacggcgtgcgtgaaaccgtagcccagcgcgacctgcgccccggcgacgtgattgaagtcgccgccggaggccgcctgcccgccgatggccagctgctctcgcccttcgccagcttcgatgagagcgcgctaaccggtgaatccgtaccggtggagcgtaacgccggggaacgcgtggcggccggcgcgaccagcgtcgatcgtctggtacagctgacggtgatctccgaaccgggcgacagcgctatcgatcgtatccttaagctgattgaagaagcggaagagcgccgcgcgccgattgagcgctttatcgatcgctttagccgcatctataccccggcgattatggtcgtcgcgctgctggtggccattgttccgccgctgctgtttgcgggcgcatggctgccgtggatctataaaggtttaacgctgctgctgattggctgtccgtgcgcgctggtgatctcaaccccggcggcgattacctccgggctggcggtggcggcgcgtcgcggcgcgctgattaaaggcggcgcggcgctggagcagctgggccgcgtgcgccaggtggcgtttgataaaaccggcaccctgaccatcggccagccgcgcgtcaccgcggtgatgacgaccgcagacatcggcgaaaacgatctgctggcgctggcggccgccgtggagcaaggctccagccacccgttagcccaggcggtcgtacgtgaggcggagcagcgccagctggtcattccgccggcaagcggccagcgcgcgctggccggctccggcattgaggcgcaggttgaaggacgtcaggtgctgatttgcgccgcgggtaaaaatcgcgatccacagtacgatgaacctattcagcagctggagagcgcggggcaaaccgtggtgctggtgatgcgcgatgaggcgctgctggggattgtggcgctgcgcgatacgctacgcgatgatgctcgccaggcggtggatgaactccatcagttaggcgttcagggaatcatactgaccggcgacaatccgcgcgcggcggcggctattgccagcgaactggggctggcgttccgcgccgggctgctgcctgcggataaagtgcaggcggtgatggcgcttcatgcccagtcgccgctggccatggtcggcgacgggatcaacgatgcgccggcgatgaaagcggcgaccattggcatcgcgatgggcagcggcaccgacgtcgctctggagactgccgatgcggcattgacccacaatcgcctcaccggactggcgcagatgatttcgctggcgcgcgccactcacgccaatatccggcagaatatcgctatcgcgctgggtcttaaggggattttcctcgtcaccaccctgctcggcctcaccggcctgtggctggcggtgctggcggataccggggcgacggtgctggtcaccgctaacgcgctgcggctgttacgtaagaagtagggacaattcccgggggcggcgcttgacgcgccttgcccgggctacggattagtgcggtctggttttttgtagcctggatcagtggcttttacggatcagatagcggtacggcagcgcctcggtttcctgcgccagcagctcatgctccataaagcggcagaaaccgggaatatcgcgggtcgtcgccggatcgtcggccacgattagcagcgtctcgcccaccggcatcgtacgcacggtcttgcgcaccatcatcaccggttccgggcaacgaagcccctgcgcatcaagcgtatggtcagggctggagaaaagttcgctcattttcatctcacattaacaaaacggccctagtttacccccagttcgccagtacgcaagccaggttaacgtttgcgcgaaaaacaaccattgcaatacgctcgcaacgcagtatcatgcagccgtttttattgggttccctcaccccaaccactaaaaaggtcacaatatgagtccgtttactaccgtacagcgtaaaaaagcgctgatctggctatcgcttttccatctgctggtcatcacttccagtaactatctggtgcagctgccgatctccatctttggttttcataccacctggggcgcgttcagctttccgtttattttcctcgccaccgacctgacggtgcggattttcggcgctccgctggcgcgacgcattatcctcgcggtcatgatcccggcgctgcttatctcctacggggtttccgcgctgttctatatgggcgagtggcaggggtttgccgcattaaccagctttaacctgtttgtcgcccgtatcgccgccgccagctttatggcctacgcgctggggcaaatcctcgacgtccacgtctttaaccgcctgcgtcaaaaccgccgctggtggctggcgcccacggcatccaccctttttggtaacgtcagcgatacgctggccttcttctttatcgccttctggcgcagcccggacccgtttatggcggcgcactggggtgaaatcgccatcgtcgactactgcttcaaagtgctgattagcatcgtattcttcctgccgatgtacggcatgttgttgaatatgctgctgaaaaaactggcagataaatctgatttatccgcattgcagccaggttaagagtactcacgaaacgatgtgataagataagcgaatgagccgttaatggccgtttatcgaaaggaagatgtcaatgcgcaatttggttaaatatgtcggtattggcctgctggttgtgggtcttgcggcctgtgataacagcgatacaaaaacgccgactgccggggctgctgcggaaagcaacgccagcgggcaacctattagtctgctggatggcaaactgagcttctccctgccagccggtatgaccgaccagagcggcaagctgggcacccaggccaacaatatgcacgtctattctgatgccaccggccagaaagcggtgatcgtgattgtgggtgacaataccaacgaggagctggcggtgatgagccagcgtctggaagagcagcagcgcagccgcgacccgcagctgcaggtcgtgagcaataaatccattgagatcaaaggccacacgctgcaacagctggacagcatcatctccgccaagggtcagaccgcctggtcttccgtccttctcggcaaggttgatgacaaactgctgacgctgcaaatcacattgccagcggataaccagcagcaggcgcagaccgaagcggaaaacattatcaacaccctcgtcatccagtaactactggcctgacgccgcggcctccggttcaccgaccgggggccgtttttttaaccgccatcccagcagcagcgccaccgcaaccagccccgccgtcgccagatagatcgatgaaatgcccgcccacgccatcagcagcccggcaagcggaccggtgatccccagcgagagatccataaataccgtgtaggttgccagcgccgacccctggttctgctgcggtacggccttcaccgccaccacgccaagcgccgggaacaccagcgaaaaaccggctccggcaaagaaagtgccgattttcgccatcagcggcgtctccgccaggcccactaacagcagcccaataatctcgacgacaaaacagatcatcgccacgttcagcccgccgaggcggttaattccgttggggaacagcagccgggtgccgacaaaggcgcagctaaacagcgtcagggcgaaggccgcgccgtcccagcctttagcatcataaaacagagtgataaaggtggcgataacgccaaaacccgccgaagccagggccagcgccatgccgtagagccagacgcgccccagcaccgcgcgaaacgacatcgctttacccttgcccgctttgaccgccgcccgcggcaacgcgcacagcacggccaccagggcgaccgccataatggtcaacgccagcccgtgcaggccaatcagcgagtaacagagcacgccgagcggcgcgcccatcgccatcgctccgtaggtgacaatgccgttccaggatatgacccgcccgatatgcagcgaaccgactaccccgacgccccacagcgtggagccggttcccgcgaagctctgcccgatgccgaggataatccggccaaggcacagcagcgccaggctaaccacgggcaagccgccgaagagcgccgccagcagatagcctagtccgctcagaaagcagccgcacaggccgaaaatgacgatcttttttggccccagcagatcggcatagcgcccggcgtgagggcggctgagcagcgtagcgaagtactggaggctaatcaccagcccggcccaaaaggcgctaaaccccatcacatcatgaacatagccgggcaagaccgccagcggcaggccaatggtcaggtagctggcaaagttaaaaatcacgacagagacaatccgcagattgaggcgcaatccattaagcgccggttcggcgacggtttcgggcatcgggttccaccagatttttacaactgtgtttcatttctaccacgccgcacgttataaatcagcagccagattaggattccaggcagcaagccagccgctacacttaatgaaaatcatagaaaggaagagtgaatgacaacccctcagcccgataaaacgggcatgcatattctgctcaaactggcgtcactggtggttatcctcgccggtattcacgccgcggcagatatcatcgtgcaactattactggcgctgttcttcgccattgtcctcaaccctctggtcacctggtttattcgccgcggcgtgcgtcgcccggtcgccattactatcgtagtggtggtgatgctgatcgtgctcaccgcgttaattggcgtactggccgcgtcggttaacgaatttgtcgccatgatgccaaaatataataaagagctgacggcaaaagtcctgcggctgcaggaggcgctgccctttttgcatattcatatgtccccggagcgtatgctgcaacgcatagactccgacaagctgatgacgttcacgaccaccctgatgaccgggctgtccggcgccatggccagcgtcgttctgctggttatgacggtggtatttatgctttttgaagtccggcatgtgccctataaactccgttttgccctcaacaacccgcaaatccacatcgccggtcttcatcgggcgttaaaaggcgtttcgcattatctggcgctgaaaacgctgctcagcctgtggaccggggtgattatctggttagggctgatgctaatgggggtgcagtttgcgctgatgtggggcgtgctggcttttctgctgaactatgtgcctaacattggctcggtgatttccgccgtcccgccgatgatccaggcgttactttttaacggatattatgaatgcctgctggtcggcgcactctttttagtcgtgcacatgattatcggcaatattctcgagccccgcatgatgggccaccggctgggcatgtctacgctggtggttttcctctcgttgctggtctggggatggctgcttggaccggtgggaatgctgctgtcggtaccgttaaccagcgtgtgtaaaatatggatggagaccaccaagggcggcagtaagttagccatcctgctcgggcccgggcgccccaaaagcaggctaccgggctagctgatcttgacgtatcaatgcatccgtatacccgtatttaaaaaagcgggtatgcgggaaatacgttattcagataagcttcatagataaatcacaacagaacactattcacctgctatttattttcaactttttcgctacagagcagaaacatccctcctttgattatattcattgatagagcatattaatttaattatacttttgcaccggcctctaacaagcggcctccattattcgtcttgacaataaaaacccattaacatcagagtctccatctatctgaacgacttaaaagcagacaaacacacgaattaatgtagaataaaaacgatagccgcataacatctacgtatcaatatttccaacacgatatattatttttttaaccaataaaatgatagggagtattcatgaaaaaaataattcgctgggttgccgccgcaacgattatcggtgctctggcaggctgtgcccgtacagcgcccattgaacaaatccatacaacagtaagcgcaggccataccgaagccgaggttaaaaatgcaatcatcaaggcaggtgcccagagagaatggattatgtcagacgctgggccgggggtgatcaatgcccgccaacaaatacgcgaccatattgctgaaattaaaattaactattccgcaaccagctattccatcaactatgccagcagcattaacctgatggcctccggtggaaaaattcatagaaactataaccgctgggtgcacaaccttgataaagatattcaaattacccttgccgcggactcagctcggtaaatgaactctctttgggccaataacggcccgttcccccactaaactgtaaaggctgtgtcaatcgtgtacaaaaaggacactctcagcgcactggatgctattaccgaagcgcagcggattgcttttgcccccatgctttttcaaactgcattatgcctacgcaactcaggcgtactagattacctcgaccatcaaggtaaactcggtgcgacgctggaggctatttgtgagcattgcgaggtaaatgaatacgccgtcagcgtattgctggatatgggattaagtggacgtatccttactcataaaggagagtgctattatctcgctaaagtaggacatttcttacttcatgatacaatgacccgggtaaatatggatttcacacaggatgtttgttatcagggattgttttttctggaaaatgcgctccaggaaggaaagccaaccgggttaaaagtatttggcgactggcccacgatttatccagccctggcacagttaccgcaggcggcgcgtaaaagctggttcgcttttgatcattactattctgacggggcattcaatgctgcactgccgtatgtattcgccagccagcccgcaaccctgtacgatgtaggcggaaataccggaaagtgggctttacgctgctgtcagtatgatgaaaatatcgcggtaacgttattagatttgcctcaacaaattgcactggctcgtgaaaatatagaaaatgcaggccttacccaccgcatcgatttccatgctgtggatatgctgagcgacgcgcaccttcccggggaagcggatgtctggtggatgagtcaatttcttgactgcttttcaccagaacaaattatcaccatgctcagtaacgtggcgcgcgtgatgaaacccggcgctcgcctgtgcattctggaactgttctgggacgcgcagaaatttgaagctgcatctttcagcctgaatgcgtcttcgctctattttacctgcatggccaacggttacagccggttctacagcgtcgacaagttttatcgctatctggaaatggcaggattccaggtagaacaacgtcaggataatttaggcgttgggcataccttattgatatgccagaaaataaaataacaaagcagcgttactcgctgttttggcgttcaatttaacgccagcaaaatcattgattgatcgcggacgcgagcggatgacattttcatttaacataattgactggcaagccatggctcctggggtcagtggcaccgaacagtggcaaaagtggtcacggcatttgcacgccatcgaccccacggcaccgttggctaagctcagcgagctgccaatgatgacggcccgccggctcagctccggtagtaagctggcagtcgagtgcgggctggcaatactccgtcgccatgagatagatgccgtggtgtacaccagccgccacggagagctggagcgtaactaccggatcctgcacgcgctggcgacagagcaggcgctctctccaaccgatttcgccttatccgtgcataactccgccgtaggtaatctgactatcgccgcgaaaaagccgatcgtttcatcgtcgctctccgccggccgcgatactttccagcagggattgtatgaagtcatgggtctgctgaatgcggggtaccagcgtattttaatagtcgatttcgacggtttcctgcctgttttttatcacccgcagctaccacctttgatgcccacctggccctatgcaacggcgtggattattgaggctggtagcgaatggcagtgtaaaacccaacgctgcgaggttggcgaggagagcgagctaccgcaaagtttgctgtttttacaacactatttgcagaataccagcacattcaccatccccggtgagcgcgcgcagtggcagtggtgccgctcatgaatagtatgctacccaagctaaaccgtctttggcgagcggcaatgaccggcttttgtttcgcgcttttcgggcttggcgggctgctgctctcgcttgtctggtttaatctgctgctggcaacgattcgcgacaaagcccgtcgccgtcgactcgcacggcgcagcatttcagccagtttccgattctttctcaccgtggtaaaagccgttggtgtactcgattttcgcattgaaggcggcgacgttttgcgccaggagcgcggttgcttgatcgtcgccaaccaccctagcctgatcgattatgtcatgctcgcttcagtaatgcccgaaacagactgcctggtgaagagcgcgctgctgaaaaatccgtttctcagcggcgtgattcgcgcggcggattatctgattaacgatcaggctgatgccctgcttccggccagcagccagcgtttacaacagggtgacaccattttgatttttcccgagggaacgcgcacgttacctggcgaaaaaatgacactacagcgcggtgcggccaatatcgcggttcgctgcggtagcgatttgcgcgtagtcgttatccgctgtaccgagcatatgctgggcaaacagagcaagtggtatgatgctccgccaacgaaaccacgctttaccattgcggttggtgagcggctacaaatcaaccaattttacgatgcaaacatacaagaaccggcgctggcggcaaggcagttaaaccggcatattttgcttcaattacaatcaggtactacgcctggcacaggaattaatgatgcaagcgctctatcttgaaattaaaaatctgatcataaatacactgaacctggacgaactgtccgttgacgatatcgaaaccgaagcggcgctgtttggcgatggtttgggactggactcaatcgatgctctggaactgggtctggcagtgaaaaaccagtacggtgtggtgctgtccgccgagagtgaagagatgcgtcagcactttttctccgttgccacgctggcatctttcattcacgcgcaacgtacctgaggagacgccgttatgaccgcacaaaacgccatttacgaagaagtctccgcgctgctgattaagctgttcgaagtcgatgcgcaggcgattcaacctgaagcgcgcctgtacgaggatctggagctggatagcatcgacgcagtcgacatgatcgtacatcttcaaaagaaaaccggtaagaaaatcaagccggaagagtttaaagccgttcgtaccgtgcaggatgtcgtcgatgcggtagaacgcctgctcaaagaagcataattctccgtgtcaggcgcacggtcgctgccggtcatcaccctgctgacaggtttattgctgctgacctggccatttttgatctggtttggtctggcgcataacggcctgcgctggctgctgccgctaattgcactcttgctgtttttacgctgtcgtcagatccgacgacaggcggggccactacgcatcgtcacacagatcgttgctgctgcaggcatcacgctgtgctctgccagctatctgctcaaaactcaccaactgctactgttttacccggtggtagtgaacagcgtcatgctagcggtttttggcggttcgctgtggtcagctatgccgattatcgaacgcctggcacgactgcgagaaccagaccttccagaaactgccgttcgttatacacgccgtgtgacacaaatttggtgcgcatttttcatcttcaacggcagcattgcgctcttaaccgcgctgcacggcgacatgtctatttggacggcgtggaacgggatgctctcttatctgttgatgggcatgctgatggccggtgagtggttagtacgccagcgggtaatgaaaagagataatcaatgaagccgatcctcactctggcccagtggctcaacgcccctcgcccggtcgacacgtcgattgcatggcaggaaggacatacctggacacttgggcatctgcgcaaggatgtcggtcatctgcttgaatacctgcaacagcaggaaggcgatcgctgggcgctatgttttgaaaacagctatttgttcatcgtcgcgctgctggcaacgctgcatgcaggtaaaataccggtgctccctggacactgccgcgtaacattattgagtgagcagcacaccctatttgacggtctattgagcgataaagcgctggactggcagggctcgctgcgggtggtcagttccgccatgacgctcgccactgaatccttcgcctttccagcaatcgacaacgatgcatatattgagctgtttacctccggatcgactggtcagccaaaacgtgtgaacaaaccaatacgccttctcaacaacgaagcacagctgctggcaacgcgctttgccgatcgtcttgcaaattgccgcatagtcgcttcagtcacacctcaacacctgtacggcctgacattccgtatcttcctgccgatggccttaggtctgcctctccacgcagggatgctctggtacgcagagcagttggcggctctgagccataaatatcggtacgcgtttatcagcagccctgcattcctcaaacgcctcgacggccagctcgctcccccaccggtagagatgatcctgtccgcgggtggtgtgctctcctggtcagatgccgcgcgagcagctagctggctgaacgtttgggtggatgaaatctacggcagtactgaaaccggcgttatcgcctgccgcgattaccaacaagatgatgcgaaatggttgccttttcctggcatcagcatccatcaggaaaatggttcatttcgcgttatttcaccgctaattgcagatgttgatggctttttactcgatgatattctgcaattttcaaaaaatgggcagttcggcctgattggacgccgggggcgggtggtcaaaattgaagagaagcgcatttcgctcagcgaagtggagcagcgcctgctgatgttggacggcatccttgatgcagcggtattaacggtaacacgcggcagccgtcaaagcgtgggcgccttgctggtcctggataacaacgcgcgaaagcgctggggtaaaacccaggaattaacatggcggaaagcgttgagctcatggctggagccggtcgccgttccccgctactggcgggtgattgatgaaattccggtaaacagtatgaacaagcgtgtctatgcgcaattacaggagttatttcatgaaaccccatgaaattgagcgccatcaagcacaacctcatcagattcaaatcgatttatatctcgaccccacgctgttctggtttcgcgggcattttgccgtccagccgctgctcccgggcgttgcgcaaatagattgggtgatgcattacgctaccaccctattcgcgcccggctggcgttttcatagtattcagaacgtgaagttccaggcgccgctattgccggagacagccgttacgctcaccgtactctggcaggaagaacggcaaatactcacctttagctatcagcgccacgacggcgaagcgcgacacatagccagcagcgggaagatccgtttatgccgttaaatttttccccgtgcgtgctgatcccctgctataaccacggcgcgatgatgtcgcgcgtgctggcgcgtcttcagccgtttggcctgcactgcatcgtagttgatgatggcagcgatttccgtacgcaacaggaactcgaacgattagcggcagcatctgcaaatatgactttaattcgcctgccgattaactcaggtaaaggcgcagcggttattcgcggcatgcagacggcagcggaagctggctttagtcatgccgtccaggttgatgccgacggccagcatgctcttgaagacattcccaaactgcttgccctggccgaggaacacccgacggcgctgatttccggacagcctatttacgacgattccattccccgctcgcgcctgtatgggcgctgggtgacccacgtctgggtgtggatcgaaacgctttcgcttaaattgaaagacagcatgtgtggctttcgggtctatccggttgcgccaacgctgcggctagcgcagcgcgtggcgctaggtaagcggatggacttcgatactgaagttatggtgcgtctctactggcagggtagtaccagttattttatcccaacccgcgttacctatccgctagacgggctatctcatttcgacgccttcaaagataacctgcgtatctcacggatgcacacgcgactgttcttcggcatgctgccgcgcatcccatcgctgttgttccgccacacatcgccacactgggcgcatcagcaggaggtcaggggattgtggggaatgcgtgtgatgcttctggtatggcgcctgctagggcgcaaggcatttactctgctactctatccagtggtcgccgtttactggctcacggcttccactgctcgtaaagcttcgcggaactggatagctcgcgtacgcgaacagctctccgagcgtctgatgccggtccccccttcgctcaccagctaccagcactttctgcgcttcggaaatgcaatgctcgataaaattgccagttggcgcggcgagctgcggttgggccgcgatgtggtattttcgcctggcgcggaagaagccctcaacgtcaactcaccgtacggcaagctgctgcttgcatcacatctgggcgatgttgaagcctgccgcgcgctagcgcaattacagggcagcaaaatcatcaacgcgctggtattcagcgacaatgcccagcgctttaagcaaattatgcaggaaatggctccgcaggctggactcaacctgatgccggtcaccgacatcggcccggagaccgccatccagcttaaagagaagctagagcgcggtgagtggattgccattgtcggcgatcgcattgcggttaatccccagcgcggcggcgaatggcgcgtctgctggagccgctttatgggccaacccgctccgtttccacaggggccgttcattctcgcctcgattttaggttgtcaggtggatctgattttcgccctgcgccagcagggaacgctgcgtattcactgcgaaccgttcgccaatccgctgctgctgccgcgcgccgaacgtcaggatgccttgcagaaaactatcgagcgctacgccgaacgcctcgagcactatgcgctccagtcgccgctggactggtttaactttttcgatttctggcaactgccggacaccaaacacaaggaataaaaggtgctgaacgatccccgctttacggctgaagtcgagctggctatcccgttccacgacgttgatatgatgggcgtggcgtggcacggcaactacttccgctactttgagattgcccgtgaagcgcttctgaaccagttcgactacgggtaccgacagatgaaagcctcaggttacctgtggcccgtggttgatgcgcgggtaaagtaccgtaatcccctgacctttgagcagcgcattcgcgtccgcgcgcgtatagaggagttcgaaaaccgcctgcgcatcggttatgaaattttcgatgccgaaacaggaaagcgggcaacgactggctacaccattcaggtagcggttgaagaaaagagtcgcgaactgtgctttgtcagccccacgattctgtttgaacgtatgggagttacgccatgagattcttaccactgctggcgctgttcatcagtcccatagtcagcgccctgacgcttgataatctgcaacagcgctttaccgaacagccggtggtccgggcgcatttcgatcaaaccagaacgattaaggatctgccgcagccgttgcgatctcaggggaagatgctgatcgcccgcgaccagggtttactatgggatcaaaccagccctttcccgatgcagttgctgctggatgacaagcggatggtgcaagtgattaacggccagccgccgcaaaccatcaccgccgagaacaaccctcagatgttccagttcaaccatctgctgcgcgcgctgttccaggccgatcgtaaagtgctggaagagaatttccgcgtagagtttgtagacttaggcgaaggacgctggacgctgcgcctgacccccatcaccacgccgctggataagattttcgcgaccattgatttagccggaaaaacgtatctggagagcattcaactcaacgacaagcagggcgatcgtaccgatatcgcactttcccaacatcaactcacgccagcgcaactgaccgatgacgaacgccaacgctttgccgcccagtaaacgccctgcgttgctatggggaatcgcctgcctgatcctgctgggcgttctgctaacgcagctgcctcaggcgcggctaaacagtagcgtgctggcgatgctgccaaagcaaacactggggaagacccctccgagcctgaacgacggtttcatgcagcgtctcgaccgacagttggtctggttggtaagccctggtaagaaagccgatccggcggtagctcacgactggctgatgcgattgcaaaaatcgcaggcgctggctgaagtgaaaggcccaatggacgccaacagccagcaagcgtggggagcttttttttggcagcatcgcaacggactaatcgatagcgacacccgtgcgcgtttgcaaaacggcggcgaggcgcaggcgcaatggatactttcccaactctactcggcattctccggcgttagcggcaaagagttgcaaaacgatccgttgatgctgatgcgcggctcgcagctggcaatggccaaaaacggccaacgcctgcggctgatggacggctggctggtgactcaggataaacagggcaactactggtatctgatgcatggcgagctggccggttcctcgtttgacatgcagcagacgcatcggttggtcaccacgctaaaaacgctggaaggtgaacttaaagcgcaatatccgcaggcacagttgctgtctcgcggcacgctcttttacagcgattacgccagccagcaggcgaaacaggatatctccaccctcggcgtggcgactctgttcggcgtgattctgctgattatggcggtattccgctcgctgcgcccgctgcttttgtgtctgatatccattgctattggcgcgctggcgggcacggtcgtgacgctgcttattttcggcgagctgcatctgatgacgctggtgatgagcatgagcattatcggaatttccgctgactatacgctctattatctgaccgaacggatggtgcacggtgcacaaatgtcaccgtggcaaagcctcgctaaagtgcggaatgcgctgctgctggcgctactgactaccgtagcggcgtacctgattatgatgctcgcccccttccccggtattcgtcagatggcggtcttcgcggtgatggggttaagcgcctcctgtttaacggtgattttctggcatccgtggctatgtcgtggtctgcccgtccgtcctgttccgtccatggtacaaatgctgcgctggcttgccgcatggcgacgcaataaaaagctttccatcggtttgcctgtggtgctggcgctgttctcgctggcaggtcttgccacgctgcgcgttgatgatgatatatcacagctacaaacgctgccgcaggacatcctggcccaggaaaaagccattaccgcgctcaccggacaaagcgtcgaccagaaatggttcgtagtttatggcaaatctgcccagcaaaccctggagcggctggaacgctttacccccgagctggagcaagcgaaaacagaaggatggctcagcaggtatcgcaccattccgctaaattcgctcacccgacagcagcaggatcttagtttgttgaaaaatgctgcgcccaccgttaccgcagccctgaataacgccggactagcggcagtaaatcccgacctcaacgccatgcaggtaacggttgatgcctggcttgccagcccggctagcgaagggtggcggctattgtggataacgctggcagatggagaaagcggcgtactagtgccagtagaaggcgtgaacaatagcgcagcgctaaatgctctcagcacaagatatgttggtgttgcgtgggtggatcgcaaaagcagcttcgacgagctgttcacactttatcgtcatatcctgaccggcctgctgtgcgttgcgctagcggtgattgcctgcggggcgatgattcggcttgggtggcgaaaagggctaattagcctggtgccgtcgatgttatcccttggctgcgggctggccgtactttcgctgagcggtcatacggtaaacctgttctcgctactggcgctggtgctggtgctcggaattggcattaactacacgctgttttttagcaatccgcacggcactccgctgacgtcgctactggcgattacgctggcgatgctaactacgatcttgaccttgggcatgctggtttttagcgccacccaggctatcagcagttttggcattgtactagtaagcggtattttcaccgcgtttctgctttcaccactggcgatgcccgcgaaaaagagaaaaaaagataatgattaaaccgacgttctggcgcgccatcgctctgatcgcaacgctgatactggccggatgcagcagctcgcagccggaacaacaagggcgccctcaggcctggctcgagccgggcacgcgcgtcacactgcctttaccggacatctctccgccgattaattcacagcaactactcaccggcagctttaacggcaaaacccagtcgctgctggtactgctcaatgctgacgataaaaatctcacgttggcaggactctcctctgtcggcattcgcctgttccttgtgacctacgatgaaaaagggctgcacagcgaacagtcaatcgtggtaccgcagttgccgccagcaagccaggtgctggctgatgtcatgctcagccactggccaattcacgcctgggagtcgcagttgccaaaaggctggacattgatcgactgcggcgataagcgcgaactgcgcaacgccagcggtaagctggtcaccgaaatcatctatctgaatcgcaaaggcaagcgtgagccgatcagcatcgaacaacatgtctttaaataccacatcaccattcaatatctgggtgactgaaatgatctatatttctgccgtcggcatgatcaacgcgctgggtagcgataacaatgaaattgccgccaacctgatgcgcggcgtggcacccggtatgcgccctcgttcgggctggcttcggggacatccgcacgcggtattagccggtgtagatggcgaactgccggtcattcccgatgagttcagcgcccatcgttcgcgcaataatcaattactactggcggcgcttaaacacattcagccgcaggtcgataaggctattacgcagtacggacgggaccggattgccgtgatactgggtaccagtacctctggacttgatgaaggcgatacgcacgttaatctgacgcttaacggacaggaaagcgcggcctggcagtacccgcaacaagagctgggagacccatcgcgctttcttagccgctggctggcactggctggcccggcattcacgctgtcaaccgcctgctcttccagcgcccgggcaataattagcggacgccgcctgcttgaagccgggctagcggacgtcgcgattgtcggcggtgcggatacgctgagccgaatgccgatcaatggcttccacagtctggaatccctctccccaacgctgtgccagccgttcggtcgtgaccgcaatggcattactattggtgaaggtgccgcgttgatgctgctgactcgtgaaccgcagcctattgctttactgggcgtgggcgagtcgagcgacgcataccatatttcagcgccgcatccacaaggtgaaggagcgatccgcgccattcatcaggcgctgcacgacgcaggaatcacgccagagcaggtgggctacatcaatctgcacggtaccgccacgccgcttaacgaccagattgaatccagagtggtgcacgaactgttcggcgaaacggtgccatgcagttccactaaacacctaaccggccacacgctgggtgcggcagggatcaccgaagcggcgatcggtatgctaattttgcaacgcaacctgccactaccgccgcagaattttagctcctcgccacgcgacgaaacgctgccgccctgcggtatcatcgagcagccgcagccgcttgaacgtccagttatcctgtcaaactcgtttgcctttggcggcaataacgccagtattctgctcgggaggatctcatgagcgactatttaccccccggcgaatacctgccgcacgacgagccaatgctgctgcttgatgaagtggtaaatgtgacggacgactccaccctctgccgagtcacggtatcggccaatggcacgctggccccctttctcgatgcagaaggccatctccccggctggtttgccctggagcttatggcgcaaaccgttggcgtctggtcaggctggcaccgccaccggcagggacaagagagtatttccttaggtatggtactcggcgcgcgtgaactggtctgcgcggcggggattgttcccgccggattaacgctgaatgtctccgtcacgttgctgatgcaggatgagcgcttcggcagctttgaatgcacgatcgccgctggcgaagagacgttggctactggcagggttaacaccttccagccaacatctgaagaacttaacaccctatttcaacaaggagcgtccgcatgaatcgttcagttttggttaccggctccagcaagggaatcggtcgcgctatcgccctccaactggcagcggacggctttattgttggcgtccattatcatcgcgatgcgcagggcgcgcaggagacgctggatgcgattctcgccgcaggcggcgctggccgcctgctgacgtttgacgtcgccaaccgcgagcagtgccgcaaggtgttagagcaggatatcgaggcacatagcgcgtggtacggcgtggtgagcaatgctggtatcacacgcgatgcggccttcccggcgctcagcgataacgactgggatacggtgatccacaccaatctggatagcttctacaacgttattcagccgtgcatcatgccaatgattagcgcgcgtaagggcgggcgaatcattacgctttcttcggtttccggcgtaatgggcaatcggggccaggttaactacagcgcggccaaagcggggattatcggggcgacgaaagcgctggcaactgagctggcaaaacgcaaaattaccgtcaactgcatcgcaccggggcttatcgacaccgggatgatcgaaatggaagaggccgcgcttaaagaggcgatgtcgatgatccccatgaaacggatgggccatgcggacgaagtggccgggcttgccagctatttaatgtcggatgtggcgggctacgtgacccgtcaggtgatttccatcaatggagggatgttatgacgcgtagagtggtgattacaggcatgggcggtgtcaccgcctttggagaaagctggcaggccgtttccaccagactgcttgactacgagaacgcagtacgcaaaatgccggagtggcaggtttatgacggcctgcatacgctgctgggcgcgccggtcgatgatttcaccccaccggagcattatacccgtaagcgtattcgctccatgggccgcgtatcgctgatgtccactcgcgccactgaactggcgctggagcaggcagggctaattggcgaggcagtgctaaccaacggcgaaactggtatcgcctatggctcctcaaccggcagcaccggaccagtgagtgaattcgccactatgctgaccgaaaaacacaccaataacatcaccggcaccacctacgtacagatgatgccgcataccaccgccgtcaacaccgggctgtttttcggattgcgcggtcgcgttatccccacatccagtgcctgtacctcaggcagccaggcgattggttacgcatgggaagcgattcgtcacggatatcaaacagtaatggtggctggcggcgcagaagagctatgtccgtcggaagcggcagtgtttgataccttattcgccaccagccagcgtaatgatgcccccaaaaccaccccttccccgttcgatgaacaacgcgatggtctggtgattggcgaaggcgcaggcacgctgatcctggaagaactggagcacgccaaagcgcgcggtgcgaccatctacggtgagattatcggtttcgccaccaactgcgacgcggcgcatataacccaaccgcagcgagaaaccatgcagatatgcatggagcagtcactgaaaatagcaggcctgagtgctctggatattggctatatttccgctcacggaacggcgaccgatcgcggtgatattgcagaaagcctggcaacagaggcgatttatggtaacaacgtccccttctcttccctgaaaagttattttggccataccctgggtgcctgcggtgcgctggaagcctggatgagcctgcatatgatgcgcgaaggctggtttgcgccaacgttgaacctgcatcatccggatgccaactgcggcgcactggattacatcatgggtgaagcccgcaaaattgactgtgagtttctgcaaagcaacaactttgcctttggcggcattaacacctctattatcatccagcgctggccctgaaatgtaccggctttttctgggaaacgtgtcggccttaagcgcaggcgatctgccgtctgcattgatctcctgcgcgcctcagggcgccggccaaactcgctggctggccgggcgtgccctgctttcccatgccgtttcgccactgccggaaattatctatagcgaacagggcaaacctgctttctcggccggtacgccactgtggttcaatctgagccacagcaacgacgatatcgcgttactgctgagcgacgaaggtgaagtgggttgcgatatcgaagttgtacgccagcgcgataactggcgcgcgttggtaagcgcggtttttagcccccgcgaacaggctgagatcgaggctatccccccggaacggcagatagctgccttctggcggatctggacacgcaaagaagccatcatcaagcagtacggcggaagcgcctggcaaatgcgcagtatcgacagcacgcagccctccgcgctgtcggtgagccagattcagataggatcgctcagcctcgcggtctgcacgccaacaccatttcttttgaccaccgcgaacatcagccgggttcgctcgtaaaatcaagccctgcgggcaaccggcaccagactgcacgctcccgtagcgcggtcaacactgcaccaccggaaagattcaatgccaatcatcagccccgccacactttccggaggcgatgctgcgcatctgtccgggctaccggccagcagccggctcaactccgcagcccgagcggcgcagcgccaccgggaagaaacagtgatattagccaggctaattgagccgcttcaccggccagaagatcgtcagcaccccggcgacaatcagcagcacgcccagcagcgattgccagtggaaaggttcatgccagccggggagccagatggcggcggcccataccaggatgtagctcaggctcagcagcgcgtaggctttcgccagcggcagttgatgcagagcgaagtaccagcagaccatcgacagcaggtaacccataagcccgaacgccaggccaaacgtgcccgcccgcagatgcagcagatggttgaggaaggtgaatatctccgtcagcggcgggagctcgaccatcgcgctgcgcagcagcagctgcgcgccgctcgccaggccgacgctgaataacgcccagattaagcccatcagatacggctcccgagaataacgatcccaacgacgatgagacccacgccaagccagtggcgacgcgcgaccggctcgcgccagatcccccacgccgccagcgtcacccagacgaagttcaggctcagcatgggataggcgatgctgaccgggatcgactgcagcacgctaagccacagcagcatgctgcagccgagagagagcagcgcgagccccagccagccaaggatatggtacccgcgccgcccggatttggacgggcgggtcgcctgtttctggcacagctgtccggcgcagctcagcaggctggcgaaaaccagacagatccagacgctcattgcggcagatactggatatataccacgcgcccaagctcgtaggagctatccggtttcggtagcgctaaatcagccatactttctcctttatccatcagcagaaccagcgagacggggccctgttggcggtgcgtcgctagccagtcagcaaaatgggcttgatcgacaaactggtgctgcgcgtccggccaggagagaccgtacttcagctcgccctgcttgtcgaacagaatgatatcgctgcgcttgagctcccacgacagcccgccggcgataccgacgttattggtcaacacgtagcggctcggggtcagcgattcgctgacgatatccaccaggaactgcggctgcttgctgtcgatcacccgatccgggatagcgaagcccaccagcagcgccagcccgagcgggcagcaggcggcgagggtccagcggcggccgttgtccttcatcgccatccagcccatcagcgcccagcagccaaatatcagcgccgccagcaggcacttatagagctcaatatggctccataccggcttgtgcataaagccccacggcgaaaccaccagcacggcgaccaggccaatcaggccaaaggccaggttgatcgcgccgttaattttcagcgccttcgcccccgctttcgccgcgtccagcgcgtagcgcgccatcagaatcgacaggggagcaaaacagggcaggatataggttgggagtttacccttagcaatgctgaagaacaggaacggcatcgccacccatccgagcaaatagagcgcaccgcgcgactcatcgcgttcggtccagccgcgcttgagcgcacccggcagcagcgccagccacggcaggctgccggcaatcaggaacggaatgtagtaccagaacggcgctttatgctgggcatctttttccgcgaaacgctggatatgctccacccagaagaagtagcgccagaagtccggctcgcgtttggcgatggcaagaccccacggcagcaccaccagcgcgcagacgcccaccgccagccagccgtaagtcaacacttcgcgccagcgcttacgcgcaatcacccacggcagtaccccgaccaccggcaccgccagcgcgaggaagcctttggtcatcacccccatcccgcaggccacgccgagtaaaacatagccgagaattttgccgccgcggctttgggcctgcgccgcgccccagaagctgcacatcgccagcgccatccacatggtgatcatcgggtcgagcaccgcgtaggtgccgataccgtagaccagcagcgtggtcaggaagatcgccggtgacaggatcgcgacgcgtttatcgcggaaaagacgccatgccagccaggcgaccagcagagcggtgacggtaatggaaaacaccaccccaaagcggacggcaaaattattgtggccgaatagccactggccgatgctgttgatccagtagccggcaatgggcttttcaaagtagcgcagcccgaggaaatgcggcaccacccagtcgccggtcgccagcatttcgcggctgatctccgcgtagcgggtttcatcaggctgccagagcaggcggaagttaagcggcagtaaatagtagaggacaaaaagggcgaccagagaggcgccgtagcgaatgcttttcatcaaacacccgaattgagtaattgttcacgtccaagccagccttcccggccggccagttcaccacgaaccactttacctcgcggcagcacgctaaaatcggcgggcagcagctggcttagcgggcaaaaccggatctcttcctgtgcggccatggtcagcagttcatcaaactgctccgcgaaggcgatgccttccacttcggcatggatggtatagaccggcgtccccgcgtcgcgatggatgcagtccagcagatagcggttgaagcccgcactatccaccgcgttgcccaccacttcatcccaggtcggtaaggttaccgggatctgcacggttcccggcgcgccgttccccagctgcggcagaaaaggcccggtcccccggcagtcgctgttatagaggaaatcgaaagcctctttggctttgatcacccgctgatcggcacgccagccggcaacggcggaacaggtgaccgggcgaccgataatccgctccagctccagcagcccgcgttcaacctccagcgtcagcctttcctgcggccagacgccgctccacgcctgccagctatagtgatcccaggcgtgcaggccgacttcatgctcctgcgcggcggcgcggataacgtcctcattcccggcgccgatcctgcgccctggccaggcggtaccggccagcaggatatcccagccgtacagcgacgcggcctttgagcgcagcatcttccacagaaacttcggttttatcaggcgccagatatggcgccccatgttgtccggcccgacgctgaaaaagaagcttgcctgaatcccgtgctggctcagcagagccagcagccgcgggaccccgtcccgcgtgccgcgaaaggtatcgacatctatgcgtaagccgacctgtttcatgattttccgctgtccgtcagctcaaccgtgcgcaggaagaagtccagggtgtgttccacggtctcttccatttccaccgttggcacccagttcaggcagcgcttcgcgttgcgaatgctcggcttacgatgttcgacgtcctggtagcctttaccgtagtaatcgctgctttccacttcgcggaacccggcaaacggcgggaagcggtcgcgcagcggatggcgttcaaagcaggccagcagcatttccgccagctctttgatactcgcttcgttatccgggttgccgatgttgatgatctgcccgtcgcagcggccgtctttgttctcaatgatgcggaacagcgcttcgataccgtcgctgatatcggtaaaacagcgcttctgcttaccaccctcaatcagcttgatcggcgaaccttcaaccaggttcaggatcagctgggtgatggcgcgagagctaccgatgcgcgcggcgttgaggttatcgaggcgcggccccatccagttaaacggacggaacagggtaaacttcaggccgttcttatcgccgtaggcccagatcacgcggtccagcagctgcttggagaccgagtagatccagcgctgtttgttaatcggcccgaccaccagattggaggtatcttcatcgaagttattgtcggtgcacatgccgtacacttccgaggtcgacgggaagatgatgcgcttatcgtatttcacgcagtcgcggataatcttcaggttctcttcgaaatccagctcaaacacgcgcagcgggttgcgggtatattcgattggcgtggcaatcgccaccagcggcaggaccacgtcgcacttcttaatgtggtactcgatccactcggagtgaatgctgatatcgccttcaacgaagtggaagcgcgggttgtcgaggaagcggctgatagcgtcggagccaatgtccaggccgtaaatctcgtagttgtcgtcctgcagcagacgctcggtcaggtggttgccgataaagccgttcaccccgaggatcagcacgcgggtacggcgcttaatcgccaccaccggtttgctgctcagcaccgcgccggcaaccaggccaagcgcctgcgccagctgcgtaccctgcatataaacgccgcgctcggtctgcccggtaacgatttctaacgccccttcctggcaggcgaccaccagcggcgcaacggagatcaccgtccccgctttggcggcggccagatcgtggcgcacgcgggatttccagacgataaacttgttcgcgccggcgtagccgaacgcgcccggccacggatcggagaccgcacggacgaggttgtgcagcgtctgggccgagcgttcccagtcgaggcgaccgtcttccggcgtacggcgaccgacgtaagtcgcctggctttcatcctgggcgcgctcttcggttttgccgtcgcggatggcgggcagcgcctgagccaaaagttccgacgccgcggaacagagcttacggtgcagcgccagcgccgcgtcatccgcgccgatcgcgacgcttttctgcgccacgatattgccggcatcggcgcggttaaccatacggtgcagcgtcacgccggtttcgctttcgccgttcaccagcacccagttcagcggcgcgcggccgcggtattttggcagcagtgaaccatgcaggttaaaagccccctgcggcgcaatattcaaaatgtcatcgcacagcaggttgcggtagtagaacgagaacagcacgtccggtttaatctcacgaatacgttcgatccacagcggatgattcgcatcttccggcgcccataccgggatgccttgctcagcggcaatacgcgccacggagccaaaaaaatggttttcgccagggttatccggatgggtaaaaatagcggcgatgtcataaccggcatccagcagagactgaatacctgcacaacccatatcgtgataagcgaagactacggctttcatgaacgatcttcctcttgagatgccgtttccggctggcgaacaacacgttgaataaagtagcgagggcgggcgcggacatcgttatagatgcggccgatatactccccgagcaggcccatcccgacgaactgggcgccgataaacatgaacagcaccgcgaacagcatgaacaccccttccgccgcccactggggaccaaacaccagacgcagcactaccagcatcaggccgaaggcgaagcccagcagagcgatgacgctgccgaacaggctcagcaggcgcagcggcgtggtggtcaggcaggtcaccaggtcgtacatcaggttaatcaggcgcataaagctgtatttagaatcgccgaattcgcgctcggcgtgcatcaccgggatctcaaccgcccggcgggcaaaagtgttcgccagaatcgggataaacgtactgcgctcatggcagttgagcatcgcgtcgatgatatggcggcgataggcgcgcagcatgcagccatagtcgcccatcgctttaccggtggtgcgctggattaggcggttgatcatcttcgaggcgcttttacggaagaaggtgtcctggcggttctggcgcacggtaccgaccacgtcgtagccctcatcggccttctcgaccaggcgcgggatctcttccggcgggttttgcaggtcggcatcaagggtaatgatcaggtcaccggtaacgtggctgaagcccgccataatcgccgagtgctgaccatagttgcggttcaacaggaccgccaccacgtggctgccttcggcctcggcggcttcggtgagcattcgcgccgagtcgtcgctgctgccgtcgtcgaccagcagaatttcatattgccgtccgagcgtcgcgcaggcggtgtcggtgcggcggataagctccggcaggctctcctgttcgttatacacaggaataacgaccgagacctttttcacgggagggtagctaaacatatcaacgtcctgacagctggtgcagtgcggaaatgacccgagtgacatcgtcatcggtcatatccgggaacaacggaatggaacaaatgcgcgcgctgttccattccgtatgcggtaatgaaacttcagggaaacgctcgcggtaatacttttgcgtatgggccgcgcggaagtgcaggccggtgccaatgcccatggccttcagtctttccatcagcgcatcgcggctgatgccgcaggcggcttcgtcaacgcggataataaacaggtgccaggcgtgctgatgctcccacgacggcgccaccagcggcctgaagggcgtatccgccagctcgcgcagatagcgttgcgcaatggcggcgcggcgctgattggcgtgggcgagcttatccagctgcaccagcgccagcgcggcgttgatatccgcgagattgtatttaaagcccggcgaaatcacctccgcctgcggcgcgcggcccagggtctggcggtcataagcgtcaacgccgaggccgtggaacttcaggctgcgaatgcgcgcggccagctcgtcatcgtcggttaccaccagcccgccttcggcgcaggtcatattcttgatcgcatggaatgaaaaaatggcggtaccgcgccacccgacgtggcggcctttgtagtacgtccccgccgcgtgggcggcatcttcaatcaccggaatagcgtgacgctcgccaatcgcgcgaatggcgtcaatatccgccggtgcgccagcatagtgcacagggataatggctttggttcgcggggtgattgccgcttcaaccgcttcgggggtaatcatcaggttatcgggatcgacatcgatcatcaccggggtcgcgccgagcaggcagatcatgttcagcgtggagacccaggtctgggaaggggtgatcacttcatcacccgcaccgatacccagccccatcagcgtgacgtgcatgccgccggtcgccgaactgacggcgatggcgtgacggttgccggttaacgtgcagaacgcctcttccagcgcctgatttttcggtccagtggtgatccagcccgattgcaaaacttcacgcagcgcagccagctctgcgtcgcccatcgacgggcgcgaaaacggcaaaaaatcgctcatcatgttcctgttctgtgaatgacccgcgaaaaaacgggtcgataagaaatatcctgcacctgctgacctaaacaaaatgaaaatgaaagcgaaatcagtccgatggcgcatttcattattttgtattcagatgttattaaatttagtcagctttgcttaggataatattaagaaattaatattaattagatatgcatgatgattttgttaaaaatcattgagataggttggaatttattgcagaaaaaggcgctatagcgttcccgcttgacggagaaatagcgggaacgcattggcgaaaagtaaacggatgctcaaccagattccaataagctatctttaaacatcgttcagcaaatataaaaaatccagtcgaatcacgaaactatttcaaaatgattacaggttggcaggaaagttgtcaggtaattcattagccgggcaattaatcacttcgtcattatccgcgccgcaatcgcgcacaaaagtgatggtggcaaactcatcaatcacttctgtcggataagccggaccggcttcacgataagagaccatcagcggaatatgatcgttctggaagcagacggttttctccgggttattcattacccagcgcgggaaaaagatggtgccgtgaaacagcttatcgccgaggttaacgatcaggctcacgtcggtaccggtcggttcggtccaggaaattttgtagatgctttcgccgacgcgaacgatgtaagcctgctgatctttcacccaacgattcgccacgataccgctgtgaatgcgataatccagggtggtgccgtttttaacgtaaatttcgtagttccagccattatcataggtataaaccagatgtttaccgataaaaccgctcaggtcatgtttgtcgaatgtgctcataatctgttctcctctgtttgttgagaacaagcatactgctttaaaaaatggatgaataacgctatgtttggattaaacccattcactttttagatggattatgcacaagactacgctggaacaatgggcgctgctggagaaagttgtcgagctgggtagcttcgcgaaggcggcggacgagacccaccgcagccagtcgtcggtgagctataatctcgcgctgttgcaggagcggctgggcgttacgctgctgacgccatcgggccgtcgcgcggtgctgaccccggcaggcgagctgctgctcggccaggttaagccgctgctgcaggccttctcttatgtcgaaacccatgccgccaccctgcgagacggcgcccggacccggctggatctggtggtcgacagcattttcccacgccagcggctgttcgccattctgcgccagtttcaacagcgctacccgcaaactcaggtcaggttgaccgaagtgctggaaaacgttgaggaagagcatccggcccgcaccgaggcggacgtgatggtgctgacccgccgtcaggatattaccggccgcggcgaatggctgatgaacattgattttgtcgccgtcgcccatcgcgatcatccactctccgcactggcggggccgctggacgacagcgcgctggccccctggccgctggtgcgcatcgccgaccgcagcaacgacccgcaatcttcccgcgatgcatggacgttttccactattgatgccgccatcgatgcggtgctgtatcaggtcggatttggctggctgccggaagagcgcattggcccacagcttcaacaaggggtgctgaaggcgctgccgctgggacacggcgcgcggcgggcaacgccgctgcacctgatcgttaagcgtgatttaacacctattgatgagcaggtcgccacgctgctggatctgttcagagcgccctgatgggcttgtttacccggctcgcgctgcgcttagccgggctacagaatcactgcggtctgctcccgggggcggcgcttatcgcgccttgcccgggctacaggttccctgccgtctgtggtctggtagcccggacagatgcgcagcatcgcctccgggaaattcagcctctctgcgcgctgctcccgggggcggcgcttatcgcgccttgcccgggctacaggttccctaccgtctgtggtctggtagcccggacagatgcgcagcatcgcctccgggaaattcagcctctctgcggtctgctcccgggggcggcgcttaacgcgccttgcccgggctacgggttccccgccgtctgcgagccggtagcccggacagatgcgcagcatcgcctccgggaaatgtgccgaagctgatgcttcccggcttgcgctgcgtttagccgggctgcaggcgggttcgtaagctcatacagccaaaagagatataccgttttcttatactttcaggcccgatattgatccagcttacgccgaaagtatgatgaatctttaaaatcgtcatactttcctgtcgctgagaaaaagccttgtctattatccgcaccaccctgctggcgctattcgcctgcgcccctttgctggcctgcgccgcgtccaatgaaatcaccaccgcctggccggtcaacgtggggccgctcaacccgcacctctatacgcccaaccagatgtacgcccagagcatggtctatgagccgctggtaaagtatcaggcggatggctcggtgaaaccctggctggcaaaaagctggacccactcggcggacggcaaagtctggaccttcaccctgcgcgatgacgtgacattttccaacggcgaagcgtttgacgcccatgccgccgcggagaacttccgcgtggtgctcgataaccgccagcgccacgcctggctggagctggttaatcagatcgtcgaggtcaacgcgctcgacaaaaaccagctgcaaatcaccctgaaaagcgcctattatccgttcttacaggagctggcgctgccgcgccctttccgctttatcgccccgtcgcagttcaaagacaatgagaccctgcacggcattaaagcgccgattggcaccggtccgtggctgctgaaggaatcaaaactcaatcagtacgacgtgctggtgcgtaacgagcgctactggggcgaaaagccgcagattgaaaaaattaccgtcaaggtgatcccggacccgacgacccgcgcggtggcctttgaaaccggcgatattgacctgctctacggcaacgaagggctgctgccgctcgacaccttcgaccgcttcagccacaacccggcctaccgtacccagctttcccgcccgatagagacggtgatgctggcgctgaactccgccaaagcccccaccaacgagctagcggtgcgcgaagcgctgaactttgcggtgaataaaaaatcgctgattgataacgccctgtacggcactcagcaggtggccgatacgctgttcgcccccaccgtgccctatgccgatattggcctgacgccgcgccggtacgatccgcagcaggcgaaggcgctgctggaaaacgcgggttgggtcctgcctgcgggtaaggatattcgcgagaaaaacggcctgccgctgcgcgttgagctgtcgtttatcggtaccgacgcgctaagcaaatcgatggcggaaatcattcaggccgatatgcgccaggttggcgtggacgtggcgctggtcggcgaggaagagagcagtatttatgcccgccagcgcgatggtcgcttcggcatgattttcaaccgtacctggggcgccccctacgatccgcacgcctttatgagttcgatgcgcgtaccgtcgcacgccgattttcaggcgcagcagggattagccgacaaaccgattattgataaagaaatcggcgaggtgctgataaccaccgatgaaacgcggcgtcaggcgctgtacaaagacctgctgacccgactgcacaacgatgcggtctatctgcccatcagttacgtctcgatgatggtggtcgccagaccggagctgggggcgattccctacgcgccgatcgcgtctgaaattccgtttgaacagattaagccggtgaaaccctgatgttacgttacgcgctgcggcgggtcgcgctgctgataccgatgatcttcgccgcctcggtgattatctttttaatgctgcgcctgggcaccggtgacccggcgctggactatttgcgcctgtcaaacctgccgccgacgccggagatggtggcctcaacccgcgcgatgctggggctggagcggccgcttatcgtccagtacggcagctggctgtggcaggcgctgcatctggattttggcgtttcgttcgccacccagcgtccggtactggatgacatgctgagctttctgcccgccacgctgcagctggccggcgccgcgctggtgctgatcctcctcacttccgtaccgctgggcatctgggcggcgcggcaccgcgaccgcctgccggattttattgtgcggatcatcgcttttctcggcgtgtcgatgcccaacttctggctggctttcctgctggtgatgttcttttcggtttatctgcaatggctgccggcgatgggctatggcggctggcagcacatcattctgccggcggtgtcgatcgcctttatgtcgctggcgatcaacgcccgcctgctgcgcgccagcatgctggaagtcgccgggcagcgtcacgtaacctgggccagactgcgcggcctgaacgacaggcaaaccgagcgccgccatattctgcgcaacgcctcgctgccgatgattaccgccgtggggatgcatatcggcgagctgattggcggcacgatgattatcgagaatatctttgcctggcccggcgtgggccgctacgccgtctcggcgatttttaatcgcgattatccggtgattcagtgtttcaccctgatgatggtgatcgtttttgtggtctgtaacctgatggttgatctgctgaacgccgcgctggacccgcgcattcgctgccatgaaggagcgcgctcgtgaactttttcctctcttcacgcgggtccgtccgcatttctttgcttatcatcgccctgctggcggtcgttgcgctcaccagccagtggtggctgccgtacgatccgcaggcgatcgatctgccttcgcgcctgctgccgcccggcagccagcactggctcggtaccgatcatctggggcgcgatatcttctcgcgtctgctggcggcgacccgcgtatcgctcggctcggtgatggcctgcctgctgctggtgctggcgctgggactcctcgtcgggggctgcgccgggcttatcggcggccgcgtcgatcaggccaccatgcgcatcgcggatctgtttatgaccttcccgacctcaatcctctctttctttatggtgggggtactgggaaccgggctgaccaacgtaattatcgccatcgccctgtcgcactgggcgtggtatgcgcggatggtgcgcagcctgacaatctccctgcgccagcgcgaatttgtgctcgccgcgcggctttccggcgcgggacacgtgcgggtattcgtcgaccatctggccggcgcggtcattccgtcgctgctggtgctggcgaccctggatatcgggcatatgatgctgcacgtcgccgggatgtcgtttctcggcctcggcgtcaccgcgccaaccgccgagtggggggtgatgattaacgacgcccgccagtatatctggacccagccgctgcaaatgttctggccgggactggcgctgtttatcaccgtcatggccttcaacatggtgggcgacgcgctgcgcgatcgcctggatcctcatctgatcgcggagcacgcccactaatgccgcaacaaattacactgcaaaacatcgtcttacaggccgagcgtccgctggtgcacggcgtatcattgacgctcaaacgcgggcgcgtgctggcgctggttggcggcagcggcagcggaaaatcgctaacctgcgcggcggcgctgggcattttgcctcccggcgtacggcaaacggcggggatgatcctcgccgacggccagccggtctcccccggcgagctgcgcggcagcaaaatcgccaccattatgcagaacccgcgcagcgcctttaatccgctgcacaccatggcgacccacgcgcgggaaacctgccgggcattgggtaaacccgcagacgacgccacgcttacggcggtactggaagccgttgggctggaggaggcgcagcgcgtcctgaagctttatccgttcgagatgagcggcggcatgctgcagcggatgatgattgccatggcgctgctgtgcgaggcgccgtttatcattgccgatgaacccaccaccgacctggacgccgtggcccaggcgcgcattctcgatctgctggcaggtgttatgcaaaaccgtgggcccgggatgctgctggtcactcacgatatgggcgtcgtggcgcggctggcggacgatgtggcggtgatggatagcggctgcattgtggaacagggggatgtcgaaagcctgttcaacgctccgcagcacagcatcacccgcagcctggtggcggcgcatctcgccctctacggactggagctggcctgatgacattactgagcgtatccgcgataacccatcaatataccgattcaacggtgctaaaagaggtctctttagcgctgaaaagcggtgaaaccgttgccctgctgggacgcagcggctgcgggaaaagcaccctggcgcgcctgctcgttggcctggaatcccccactcagggcagcgtctgctggcggggagaaccgctctcccggctcaatcgcgccaagcaaaaggcgttccgtcgggatattcagatggtgtttcaggacgccatcagcgcggtgaatccgcgtaaaacggtacgcgagattttgcgtgaacccatgcgacatctgctgtcattgacgaaagcggaacagctggcgcgggcaagcgacatgctcagggcggtggatctcgatgatggcatgctcgataagcgccccccgcagctgagcggcggacagctacagcgcgtctgcctggcgcgcgcgctgtcggttgagccgcagctgctgatccttgatgaggcggtgtctaacctcgacctggtgctccaggcgggcgtcattggtctgctcaaaaagcttcagcgacagtttggcaccgcctgtctgtttatcacccacgacttacgtctggtggagcgtttttgccagcgggtgatggtgatggatgaggggcaaatcgttgagacgcaggtcgtgggcgacaaattaacgttttcttcccacgccggtcgcgtgttacaaaatgcggtacttcccgcctttcccgtgcgccgtaataaggtttaaaacagatgcaacgtatcacgattactcttgatgacgatttactcgacacgctggatagcctgagccagcgccgcggctatcataatcgctccgaagccatccgcgatattctgcgcggcgcgctggcccaggaaagcgctcaggagcacagcacccagggcttcgcggtactctcctatgtttatgaacatgagaagcgcgatttagccagccgtttagtttccacccagcatcaccaccacgacctctccgtcgccaccctccacgtacatatcaaccatgacgactgtctggaaatcgccgtgctgaaaggcgatatgggcgacgttcagcattttgccgatgacgttatcgcccagcgcggcgtgcgccacggccatttgcagtgtttgccaacggagaaggagtcaccccactcatagcagtgggatgcgataaatgactctttaacgcgcgatcgggactaacgccattatggcgactcgttggcccatgcgcctcgtatcggttttgccagcagggcaagaacggcaatcatgctgatttcaatcgaaaacgaccagcaaatatgtccgagggtttcgctccacagctcgtagccattcaggttccacagccacccggtttccccgtttaaataggcgggatgcctgaagcccagcgcgggaatgaggaagccgtgcataacgagagtaataatcagaccataggccgcgccgtaccaaagccggattttcggccagtatgcggaaatgaagacatagagaaaggcaaaagcaaagctgaacagccagtggtaaagcatgacggcgccggggattgtcaccccctgataaacgtagtccagcgagtgtgaattaatgccaagccagccgagccaggcgtcgatatgcgccgccgggggcgatatctcgcccgccacgcggggcggcatattagcttccgttcccgacttcaccagagagctaatgaaccctccaatgagcgtcgtccagataataacctgaagattaatcctgcttttcaacataacagcgttcctcttaaatatcgcttatacgatgggtcacctcagttttttcaaccaacaatctcgcgggaaatagcatttataacgcatccattgctaagtatagtttgaaaaaattttgttcaccctaagagggaaaaatccccgtatcgccctgatcgcaataaactttcgccttttctcaacaattaataaaccacatgaattatatgcttggttaatcatctctcttcgcgaataatcaggcctcatttaacgatctcgttatggcgaggctcctgcataaacataagttaccgccctgttggtatcgagagagaccactcagggaaatacaggcttccatcgaatcaaggtgttgccaaggtaacttctgacggcattcatgccgggcagatacgttgtgcagtgctaaaaccaggacgtagggatctgcctgtgctcatcctgtcttgttcgcccctatgagtgattttttatagggaattacaccatgtcttccattcaactgtgcgccgcacatcaggctaccgcagcgttcgacggcgacgcgatcgcccagtacatgcgtaccgatttcattaccctgccggaacatttcagcgttcatgaagcgcgtgagctgttcgtttctcagctggccagcgatgagatccccggccaggtttttgtcgtcgccgggaaaaaactgcgcggcagtttatcgattaaaaagctgctgcaggagagcgataccgcccagtccattcgttatttaatggatagctgcctgtttcgcgtcaggcctgacgacccgcggccgcaggtggtcgccgagctggccgagcgcgggctcgacctcgtgccggtggtcgaaaaaggcgagctggtcggctgcctgatggaaaaagagatcgcgcatctgttggaagatgacgtgaccgaggatgctcagcgtcagggcgcgacgctgccgctggaaaagccctacctggaaaccagcccgtgggcgctgtggaaaaaacgttcggtatggctgctgctgctgtttgtcgccgaagcctataccagcagcgtgttgcagcattttgaggaagcgctggagtcggcgattgcgctggcctttttcattccgctgttgattggtaccggcggcaatagcgggacgcagatcacctccaccctcgtgcgttccatggcgctcggcgaggtgcggctgcgcgatatgggacgcgtaatccgtaaagaggtctcaacctcgctgctgattgccattacgctcggcctggcgggctgcctgcgcgcctggatgatgggcatcggcatggagatcaccctgattgtcagcctgacgctggtatgcattaccctgtggagcgcggtggtgtcgtcggtgatccccctgacgctcaaacgcgtcggcatcgacccggctgtagtttcagcgccgtttatcgccacccttatcgacggtaccggactgattatctacttcaaaattgcccagtatttcctggggctgaactgattattttgcccggcggggaggacttgccgggctgttttattcccgcccgaatatccgcaatcgcattaagcaatctcagtaactctggagcaagccgataaaaagcgtgtcctttttccgttaagataacttttctgatattcctgccgcgcttaatcaggttgaaacccagttcattttcaagcgcacatacgctggttgttatcaacgaaggcgcaatactcagccgctgcgatacaaaatgaacactcccctcccgaaccataagcatgaatatctccacctgtgatttattcattgccgaaacctctccagattaacctttggcttacgttttaagttgtccaccgggcaatgtcaatcgctacaagaaaatgctctccgtatataaataaaataaagtgtgaagctcgccattcgcacatttaattatgcatttcagccatttcacaattaaataaccggcctcactccggcgttcaggtatgtgaagaacatcaccacaactcgttgaccacaaaaacaaaatacacatatatatcaaagcattacaaaaaatacacatcttgcatgaatgtatggcacacgccatgcaattacctccacgtaatcaacactggagatagttaaatgacgtacaaaattttactcccgcaggaaatcatggcagaagggagagaatatctggaaagccgcggttatcaactgattaacggctcagggatggaagaagaagatatcattcgcgacatcgtcgattgcgacggtattatcgtccgcctttcaaaaatgtccgaccgcgtatttgaagcggctaaaaagctgaaagtcgttgcgcgtcacggtgccggttacgatacggtcgatctggcgtcggctaaacgtcacggcgtcgtggtattaaatgcgccaattgctaacagcatgtccgttgccgaactggccatattttatatgctgcactgctcgcgtaatttcaagctggtacaggaaaagatgcttgaagattattactgggcgaaactgcgcacgccaaaagtggagctggatggaaaaacgctgggtttaattggcgtcgggaatatcggttcacgcgtggcaatcaaagcgctgcatggctttaatatgaaagttatcgcctatgacccgtataaaacccagcagcagatccccgaaggcgtagagcttaccaacgattttgaccgtattttcaaagagagcgacttcgtttctctgcactgtccgacgacggcggaaaccaccggttttgtcggagagaaacagttttccatgatgaagcctaccgcctatttcattaataccgcgcgcgggaagctggttgatgaaaaagcgctgtatcacgccttgagcacccacgctatcgccggggcgggcgtggatgttttaaagaaagagccgtttgatgccaacgacccgattttctcgctaagcaatatcgtgattgccccgcatattggcgccgccaccattgaagcgaccgacagagcctcgctccattccgcgattggcattgatgaagtcttatccggtaagaaaccgtcctggccggtcccgggtttttaaggagaaaaaaatgactattggtaaccgtatttttttaaagcgtccgaccagcagcgtcgatcttcttaaagaatttgaacagctcccggcggcgaatattgctgacaccatgaaccgtattgccgttctgggtaacggcattaaacgtatctcttcgccgaaaaagccgattatggcggggttcgccatcaccgtgaaagtccgcgcgggcgataacctgatgctgcacgccgcgctggatatggcgggtgagaacgatgtgattgtggtctccaacgaaggcgaccgttcgcgggcattaatgggcgaaatcatggtggcctatgcccactgcatgaaaaaaatcgccggtatcgtgctggacgggcctatccgcgatatcgatgcgctgtcggttctcgattttccgctgttcgctaccggctctaaccccgcaggcccgtttaaacaaggtccaggggaggtgaacacgccgatcgccgttggcggcgtcgcggtttgtccgggcgacctgatcgtcggcgatgcggatggcgtgattgttattcccctcggcgacgcagaagccgtactgaataaagccaaagagtatgcaaaattcgatgccagcaaagtagaggccgccaaaaacggcaccgcgaatcgcctttgggtcaaaaaatcactggatgagaccggcgttgagtttatcgacgacatgtatcgttaatttgattaaataatatcaggccgcggcgccctgacgggccgcggctttaaagcaaaggtaataaaaatgctttatttaaaactcttgcccattatctttttccccgttttattttggataataccgcacccggaaggcgtctccgcaccgacctggcatatggttggcatctatctggcgatgctgtgcgggctggttttgcgcccgtttaccgatgcggtcattatgctgattattctcgggtttgcctctctggttctcgaccccgctcccctgtttgccggttttggcagccctatggtctggtttattatcagcgcctttattatttgcaaagcgtttgttattaccggactgggtaaacgtatcgcctatctgctgctaaaacgctatggaaaaaataccctcaccctgggttatctgatgatggtgacggataccgtactggccccggcaacgggttcaaatatgtcccgttcgggaggcattacctatcccatcttcaggaacatcgccgaagcgctgggctcgaagcccgacgacggtagccgcaaaatcggcgcctatctgaccatcctgatgtacgtcgtctcaatgggaacctccagcctgtttctgacggggatggcgaccaactcaattaccgtctcgctggccaacgagatcatgaaggtgaatctcgaatggatgacctggtttaaagccgccgtggtgccagccggactggtgctgctgctcgcgccgtggatactgtataaaatctacgcgccggaactgaaagttatcgataacgtcaatgaaattgccgagaagggcctgcgtgagctgggtccggtaaaacgtgaagagaagctgctgatcgtgttctttgtcctgggcgtgctcggctggatgaccggttccatcaccggcatcgcctttattcccgtcggcctggcgttcctcgcctgtctgctgcttttcggcgtgctgagctggaatgacgtggtgagcgaaaaatcggcctggcagaccttcgtctggtatggcgcgttttatggctgtgcggttgccctatcaaaaggcgggttctacgtctttctggtggacgttatcaaaaactatctcgacctgtcgcatctcaatgaaatcagcgcgattgccgtgctggtctttatcagccttgccgtccgctatttctttgtctcgaacagcgcgttcgtcgtctctttctatccggtactctttaccctgggaatgacgacccaggcgcacccgatgtacgtggcgctttctctggctttctccgcaggctatggcgcactgctgacgcactacggcaacggcgcgggcgtatttacgttctccagcggctacgtcccgcaaaaaacgttctggatgctgggcaccatcatggtggtggtcaacgtattaatcttcttcctgatcggtattccctactggaaatttatcggcatttaacgggagcataaaatgaaactggatattctgattaaaaacggtctggtcgccgatcccgaaggtcatgattatattaatcgtaatattggcgttatcggcgatcgcatcgtggacttaaataccgttgacgatttgcaggccgaaacggtgattgatgccgcgggttgtatcgtgctgcctggcttaatcgacttccatggtcatgtttttcacggcgggaccgccatcagcgtcaaccctgacatcgtatgcttgcccaacggggtcaccagcatggtcgatgccggcagcagcggctgggtgaattatccgctttttcgcaatagcgtgattcatcctgccatggtgaaaatcaaaagctatttgaacgtggtcaacgtcgggctttccaccctcgggggcgggccgaccgggtatctggaaaataccaatccggcgaattacaacgaggagaaaatcgcccaaacgctgaatagcaacagagacaatattctgggattgaaactacgctacagccaggatatcgccaaagggaaacagtacgccagcgaccctcttctctctaccgtctccctggcgcgtaaactggataccacgatttgcgttcacgtcacggactctcttctctgcgccgatgaactgatccgctattttaatgccgatgatatttacgcccactgcttccacggtaccggccactcgattctcaatgaacagggcgaggtctatgcggcaataaaagaggcgcagaccagaggggttatcttcgactgttcaaacggcgtggcccactttgattttcacgttgccagaaccgccatggagcagggattttatcccgatatcatcagcaccgatctcaccctgagaaatagcttacggacggataaggtctacagtctgctccacgtcatgtcgaaatatctcaatatgggaatgtccttcttcgatatcgttcgcgcggtaaccgccacgccggcccgcttaatgaaaatgcaggggcaaattggtaccctggcgcccggcgccagtgctgatatttcgattgttaagctgcgaaaagagaacgtcatttttgaagatacccacggggtcaaactcgaaggtgaccgttatatcgataactgcgctaccttatgcaacggtcaaattgtctaccgccgcctgcgtttctaatcactaaaaacttagccttacgcatttgctatgcgtaaggcttttattcttaatatcgtattatatgaccaccctcattgattctccctgtgctcaccatataataaacattgcaaacccagaacacctgagcgaataatatatgaagaataatgaaattgtcattttttcagtttccaaaacaataacccaacgcatcatgaatgttcttattgagaggaagctcgatgttccggtatatgaatttcgttattctgacgttctcgataaagcgaatgagatgatccagtccggcgctaagataattattagccgaggcggcaccgccgccctcctgcgtaacaatattagtatcccggtcattgagatcgcccatgattttcacggcgtttatcgcattttacaacaggccaaaatcaaatcacaaaaaatcgccgcggttggtttcccccaattttgtaatgccttacgtcattatcagaacatgactaacgaagagtttaaaatttgccaggtatacaaccacaatgatattgaaaacgttataaaaaatctttcagagaacgattaccatacggtcatcggcggcctcacggttgctgaaatggctaaaaaatataacctcaatgctattatgggagacaccgataatatttcgattgagcaggccatcaatgaagccgatagcctattaaaatatctcaacagagaaaataccaagctcatcatgagccacgccgcgctgaatcaagcacgtgagggcatcatgtgtattgatcagttgggtgagatcatcaatattaatgctatcggcctgagcttattccagtgtcatgtcggagataaaatattcaaaaaagaggcatttaaagatatttaccccagcattattaacgaattagatattaaagaacaggccattgatattaacggccaaactatttacatttccatacgtcatttttccaaccgccaaacatcttatagcattattacaggattaaaccaggaaagttcgctttggcaaaatagtatcagcaaaaaaagtaaactccgcggtttttccacaacctggtctttcgacgacattattggccagtctccggcgatacgcgatgtaataaaaaaagctaaactgtgcgcccgccacgaacttcccattcatattttgggcgataccggcacaggtaaagagcttttcgctcagagtattcataaccatagcgccagaagccacggcccttttatcgcgattaactgcgcggccattcccgagagcattctggaaagtgaactctttggctatgccgacggcgcatttaccagcgcgcgcaagggcggaaaaccgggggtgtttgaaatggcgatgaacggcacggtgtttatcgatgaaatcagcgaagcgccgttatcggtacaggttaagctgctgcgcgtgttacaagagaagcaattctctcgtctcggcggcgatacgctgatcaccgccgattttcgcctgatcaccgccagcaataaagatctgcgccagctcgtcgccagcggtgagttcaggcaggatctgtactatagaataaatattcttgagttgagtctaccggccttacgccaacgaccgggcgatatcatgttgttgattcagcacctgctttatcagcaaggtaggcaaatcacatttacccccgacgcggtggattttttgcatcgctatagctggcctggcaacattcgtgaacttcaggcggttatctaccggctcatcgtcctgctggacatcgatcgagtgagcaaagacgttttgctgcagatcggtcaaatttcaccggatgacgccaacgagagctctcacttcccggccgcgggcgtggcatcagatgaaaccgatttattaaagaaacaagagaaacggctgattacccatgtcatagaaaaaaccgacggggacaggaccaaagcatcggtgatgctcggcatcagccccacgaccctgtggcgcaaattaaagcagcacaatatcagcggataaggcggagccgggtccgctgatacagagcaggcggttatttctgttccgctaaagcctgcgcgcatgcccaggctgacgcccacgcccactggaagttatagcctcccagccagccggtgacgtccatcacttcgccgataaagtacagaccgggcaccttgcgggcctccatggtgcgcgaagagagttcgttggtgtcgacaccgccgagggtcacttccgccgtgcgatagccttcggtgccattcggctggacgcgccacgcggtcagcgtctcaaccagcgcctgctgctcgcgaacgttaagctgtttcagggtgacgtccggcagttgccccagctgctgcaggcactcgaccagccgctttggcagctgcattgccagggtgttcttcaggctctgattgggatgcgccgcgcgctgctcgttgaggaagtcatcaagatggcaatccggcagcagattgatgctgacgaactctcccggctgccagtagctggaaatttgcagtaccgccggcccggacagcccgcggtgggtaaagagcagattttcccggaagacggtcccgttttccgccgtgatggtggacggcaccgacaccccggaaagcacctgcagctgttcgagcagcggcttatgcaaggtaaacggcaccaggcccgcgcgggtcggcagcaccttcaggccaaactgctcggcgagcttatagccaaacggcgaggcgcccaggccgggcatggatagcccgccggaggcaaccaccagctttttcgccgccaccgtctcgccgttaagctgtagcgtatagccctcatcatcccgctctacgctgataatttcgctacgcaggcgaatgtgtacgccgcctttttcgcactcggccagcagcaggttaacgatttgctcggcggaatcatcgcagaaaagctggcccagggttttctcatgccaggcgataccgtgtttgctaaccagatcgataaagtcccactgggtgtagcgcgccagcgcagatttgcaaaaatgcgggttttggctgagatatgccgcgggttcgatatacatgttagtaaagttgcagcggccaccgccagacatcaggatcttccgcccgggctttttgccgttatcgagcagcagcacccgacagcctgcctgccccgcctgcgctgcacaaaacattcccgccgctccggcgccgattacgatggcatcaaacctttccacacaacattcctcatatcccgattgtcgggaattgtaaatttttcattctggtcgcaccagactgaaaaaaacagatttgcgtacctcattgaaagatataggaatactcccaacaaggtaaaacttaaacaggaagaaaatcaaaaaaagtctatatttcactttgcccgcgccgcgaaagtcactgataatgcgccgcgttcatgtcctcaaaatggcgtaacgtcctatggtacatttatttgccggtctggatttacataccggattactgttattgcttgctctggctttcgtgcttttttacgaagcgatcaatggttttcatgataccgcaaacgcggttgcaacggtgatttacactcgcgcaatgcggtcgcagcttgctgtggcgatggcggctctttttaacttcttcggcgttctgttgggcggtctcagcgtagcctatgccatcgtgcatatgttgccgaccgacctgctgcttaacatgggttcagcacatggcctcgccatggtcttttccatgctgctggcggcaattatctggaacctcggcacctggtacttcggccttccggcctccagctcgcacaccctgatcggcgcgatcatcggtattggtttaaccaatgccctgatgaccggtacgtcggtggtggacgcgctgaacatcccgaaagtcatgggtatttttggctcgctgatcgtctcgccaatcgttggcctggtcgtggcgggcggcctgattttcattctgcgtcgctactggagcggaaccaaaaaacgcgcccgtatccacctgactccagccgagcgtgaaaagaaagacggcaagaaaaagccgccgttctggacgcgtattgcgctgattttgtccgccattggggtcgcgttctcccacggcgcgaacgatggtcagaaaggcattggcctggtgatgctggtgctgatcggcgtggctccggctggcttcgtggtcaatatgaacgcttccggctacgaaatcacccgtacccgcgatgcggtcaacaacgtggaaaccttcttccagcagcgtcctgagctgttgaaaaaagcgaccggcgccgagcagctcatcccgtctccggacgcaggggctgccgcaaacggcgagttccactgccacccggcaaacaccatcaacgcgcttgaccgcgtgaagacgatgctgaccggtaccgaaagctacgacacgctctccgtggaacagcgtagccatctgcgccgtattatgctctgcatctccgacaccactgacaaagtggctaagctgccggaagtgaatgctgacgataagcgtctgctgaagaagctgaaaaccgatatgctgagcaccatcgagtacgcgccaatctggattattatggcggttgcgctggcgctgggtatcggcaccatgatcggctggcgtcgcgtggcgaccaccatcggcgagaaaatcggtaagaaagggatgacctacgcacaaggtatgtcagctcagatgaccgccgccgtatcgattggtctggcgagctataccggtatgccggtttccaccacccacgtgctctcctcctcggtagcggggacgatgctcgttgatggcggcggtctgcagaagaaaaccgtcaccagcatcctgatggcctgggtactgaccctgcccgcggcgattctgctgtccggcgcgctgtactggctctcgctgcagattatctaagcgaatatcagaaacaagaaagataaacgggtcaggaaactggcccgttttttttgtatcgtgaagctagtgccagatagccagagcaatcatgctgaccaccaccaggccgcatagcgcgctggtgagaataaactgccgacgaacccgctcgcagcggcggataaattcatcgtcgtggtgatcgcggtagcgctgggcgtagatgtaccacaccaggcgcacctgtttgccgggctgcccgtgcgacgtaaaaaaaccgccgccgtcgacatattgatagagcaaagggtcacaaccacgtagcacaacaagcaatgcacgcagcgacgagaagtagcgtgccatattcactacacatacgatacacagggcccaaaacagcgcaacagtgctgatcatacctcctccccggcgacccgtcctcggaggctccctccgggactaccgctccccaatatcaaaccgactgtactgtgaaagagtgcgattccgatcacgtttatttatccgaccggctcattaaatagtgtaggagatcagttaatttttttaccacaacgttaatcattatcaatgcataagtcggatatatttgtttaactattcgctgaacaaggtggattgacggatcgcgaggggcgctataaggtagaaatatcttctacaattaggtccttaaggactcccccccgcgaatgtagcacgcaggacgcgggcgaagcggcagcgctggctgtcaggtccaacggtcatcgacaacttatggaaggagtaacaccatggcttacaaacatattctcattgcagtagacctgtccccggaaagcaaagtactggtagaaaaagccgtttctatggcccgcccctacaatgcaaaagtttccctgatccacgtggatgtgaattactccgatctctacaccggccttattgacgtcaatctgggcgacatgcagaaacgcatctccgaagagactcaccacgcgttaagcgagctgtccaccaacgcgggctatccgatcactgagaccctgagcggcagcggcgatctcggccaggtgctggttgatgcgattaaaaagtatgatatggacctcgtggtttgcggtcaccatcaggacttctggagcaaactgatgtcctcggctcgtcagctcatcaacaccgttcacgtggatatgctgattgtcccgctgcgcgacgaagaagacgaataacaggccgttatttcatttcgctgatgaccaacgcccgccaacgcgggcgtttttatttcccccacccgccgcaaaaagcatataaatccaaataatcaccacaatgccaggctgatcaaccatttcaaaagcaatatagccatataataattcgccaaaatagataaacatcatatcattacgcaaaattaacctttttcagcgcgttttggcatacgcgttcatacttttccggacaggacttaaaggcgaagaaagatgaattcaaccgcaccgacaggcttgctgcagcaacctcgcccattcttcatgatcttctttgtggaactatgggagcgatttggctattacggcgttcaggggatcctggccgttttctttgttaaacagctcggtttttctcaggagcaggcgtttattacctttggcgcgtttgccgcgctggtatatggccttatctccatcggcggctatgttggcgatcacctgctgggtacgaaacgtacgctggttctgggcgcgattgtgcttgccgcaggctactttatgaccggcctgtcgctgctcaaacccaatctgattttcatcgcgctggggaccattgcggtgggtaacggcctgtttaaagctaacccggcaagcctgctgtccaaatgctatccgccaaaagatgcccgcctggatggcgccttcacgctgttttatatgtcgatcaatatcggttcgctgctgtcgctgtcgctggcgccggtgattgccgacaagttcggctatgcggtaacctacaacctgtgcggcgccggtctgatcgtcgccctgctggtttacttcgcctgtcggggtatggtgaaagatatcggctctgggccggaccacaaaccgctgagcctgcgcaatttactgtacgtgctggccggtacggtggtcatgatttttctctgcgcctggctaatgcataatgtcaaaatcgccaatctggtgctgattatcctctcagtggtggtgacgattttcttcttccgcgaggccttcaagctggataaaaccgggcgcaacaaaatgttcgtcgcctttatcctgatgctggaagcggtgctgttttatattctgtacgcgcagatgcccacctcgctcaacttctttgctatcaataacgttcaccatgaaatacttggtttcgcgattaacccggtgagctttcaggcgctaaacccgttctgggtggtggtggccagccccatcctcgccgctatctacacgcgtttgggcaataagggcaaagacctgactatgccgatgaagtttacccttggcatgttcctgtgcgcgctgggctttctgacggcagccgcggcgggaatgtggtttgccgacgcccaggggctgacctcgccgtggtttatcgtgctggtctatctgttccagagtctgggagaactgctgattagcgccctggggctggcgatggttgccgcgctggtgccgcagcatctgatgggctttattcttgggatgtggtttttaacccaggcggccgcgttcctgctgggcggctacgtggcgaccttcaccgccgtaccggataatattaccgacccgctacagacgctgccgatttataccgatgtcttcagcaaaattggcctggtgaccctgggcgtaacggtggtcatggcgatcatggtgccgtggctgaacaggatgattaatacaaaaagcgcgtaaaaacggagcggtcgacgaggtttcccggattgcggctaacgccttatccgggctacagaacccccagatcgcaagaacccgtagcccgggcaaggcgcatcgcgccgccctcggggaaagggccctgacgcaggttgcttacccctgcggctcaatcgccgttccggcatagatatcaaaccggtggcctttggtcaccaccgcgttaggcgtcgcgacatccgccagcggcggcgcgtagtccgggcgcttaaccaccacccgtttggtcgccagctgacgcgccggcgccagcagaccgtcggcgtctaaatccggccccaccagcgactgaaatacccgcatctctttcttcaccagcgcgcttttctgcttatgcggaaacatcgggtcgagatagaccacctgcggacgcggggtgatatcggtcagcgccgtcaggctggaagcgtgaatcagccgcaaacgctcctgtaaccaggggccgatttcagcgtcggcgtagccgcgcgccaggccatcgtcgagcagcgcggcaaccaccgggttacgctccagcatccgcacgcgacagcccacggaggcaagaacaaaggcatcccttcccagaccggcggtcgcatcgaccacatccggcagatagtcacctttgattcccaccgcttttgccaccgcctcgccgcggccgccgccgaacctgcgccggtgggccatggtcccaccgacaaaatcaacaaagatgccgccaagcttcggttcatcgcgcttgcgcagctcaagatgcgccggcgtcatcaccagcgccatcgggttgtcctcatcctgctccagcccccagcggtcagccagaacagataaggcgccgtctccggcgcccgtttcatcaattaaacaaattttcacaacagggttaactcttaataccgtaatgctcaagcatcgcgtccagctgcggctcgcgaccgcggaagcgtttgaacaggaccattggctcttccgaaccgccgcggctaaggatgttgtcgaggaacgactggccggtttcgcgattgaagataccctcctcttcgaagcgcgagaaggcatccgccgccaggacgtcggcccacagatagctgtaataacccgctgcgtatccgccggcgaaaatatggctgaaggcgtgcgggaaacggccccacgacggcccggggatcagcgccacctgctgcttaatttccgccagcgtttcgaggattttcgcgccctgctgcgggctgaactccgcatgcaggcggaagtcgaacaggccgaactccagctggcgcagaataaacatcgccgcctggtagtttttcgccgccagcattttctccagcaattcctgcggcagcggttcgccggtttcatagtggccggagataaaggccagcgcttccggctcccagcaccagttttccataaactggctcggcagctcgaccgcatcccacggtaccccgctgatgccggacacgccggcggtgtcgatacgggtcagcatatggtgcagaccgtggccaaactcgtggaacagggtgatcacttcatcgtgggtgaacagcgccggcttaccgttgacgggacggttaaagttacaggtcagataagcgaccggcttttgcagcgagccgtcaagcttgcgcatctggccaacgcagtcatccatccacgccccgccgcgtttatgttcgcgagcgtagagatcgagatagaagctaccgcgtagttcatttttttcatcgtaaagctcgaagaagcgcacctccggatgccagacgtccacatcggtacgctctttcgcggtaataccgtaaatacgcttaaccacctcgaacaggccgttaaccgctttgttttccgggaagtaggggcgcagctgttcatcgctgatgctgtaaagatgctgcttctgtttttcgctgtagtaagcgatatcccacggctgcagttcatccacgccgaattcggctttggcgaaggcgcgcagctgggccagctctttctcaccctgcggacgggcgcgtttcgccaggtcggtcaggaagtcgagcacctgctgcggattttcggccattttggtcgccagcgacttgtcggcaaagctgtcaaagcccagcagctgcgccagctcgtggcgcagggcgaggatttcggccattaccgggctgttgtcccattttccggcgttcggcccctggtcggaggcgcgggtggaataggcgcgatacagctcttcacgcagcgcctgattgtcgcagtaggtcattaccggcagatagctcgggatatccagggtcagcagaaacccttcctgctctttggcttcagcctgggctttcgctgcggcaagcgcgctttccggcatgccggagagctcagattcatcggtgaccagcttggtccagcccatggtcgcgtcgagcacgttgttgctgtactgattgcccagctcggagaggcgggcggcgatttcgccgtagcgtttctgctgctctttcgccaggccaataccggagagttcaaaatcgcgcagcgcgttatccaccgcttttttctgcgcggtattcagggtggcgtaatggtcgccgtcgcgcaggtcgcggtacgctttgtacaggccttcatgctgcccaacccaggtgctgtactccgaaaacagcggcagggtctgctcgtaggcttcgcgcagttccggactgtttttgaccgagttcagatggctgaccggggaaaaaatacgccccagcacgtcgtctacttccgccagcggctggcaaagattttcccaggtatacggcgccccttgcgccaccgcgcgctctaccgccgcccggcaatcatccagcgctttagtgaccgcggggaccacgtgctcgggtttgatggcagagaatggcggtaatgaaaaaggcgtcagtaatggattggtcatatgcgcagtcctgttgaattgggtgaatgaagcgcgcgtccggcgctatagcatgagatctagaatgggggatagtttgctgaatttcaatgtcaggcgccgcgcgcaggcgggtattactgcgataagtctggccgttgtggccagagcgcataaaaaagccgggttcgcctcgcggcgacccggctcgttttaggcggacaagcagcttataccaccatccccagcagcagacagcctaccaggccgcacactgagataatggtttccagcaccgaccacgacttaatggtctcgccgatggtcaggttgaagtattccttaaacagccagaagcccgggtcgttaacgtgagagaagataacgctgccggagccaacggcgatcaccatcagttccgggctcacgccggtggtggcgatcagcggcgcggcgataccgcccgcggtgatcgccgcaacggtggcggaacccagcgcaatacgcagtaccgcagcaatcgaccatgccataaacagcggggacatattggattcatgcatgatagaagcaatgtatttatccatgccgctatcgaccagcacctgcttgaaggcgccgccgccgccgatgataagcagcatcatggcgataattttgatcgaggaggtcagcgtatcgttaatctgctccatggaacgaccgcggttaagaccgaaggtgaacatggcgatcagtaccgcgatcagcgtggccatgaccgggtcgccgaagaattccgcgatcggcaggaaggcatgacctttcggcagaaccatttcggccacggcgcgcatggccatcagaataaccggcaccagagaggtccagacgctgacgccgaagcccggcatctcttcctcagtgaacgttttcgggttatgcaggccttccggaatcggcttatcgatacctttcaggaagcgtgcgtaaaccggccccgcgaggataaccgtcgggatcgccagaatcgtaccgaacagcagggttttacccatgtcggcatggaaaatagtggcaatggccgtcgggcccgggtgcggaggcaggaaaccgtgcgtgacggagagcgcggccgccatcgggacgccgatatagagcagcgggataccggcggatgcggcgatggtaaagaccagcggcagcatcagtacgaagcccacttcatagaacagggcgaagccgacggtaaagccggtgagcacaaccgcccattgaatatgttgtttaccaaatttggcaatcagcgtggtggcgatacgctgcgcgccgccgcagtccgccagcattttaccgagcatcgcgccgaagcccatgatcagcgcgaggctgccgagggtccccccaacgccgtttttgatggagacgataactttatccagaggcataccctgcatgagcccgacggcaagtgccaccagaaccagagcgataaacccgttcagcttgaaacggatcatcagcaacaataacagggcaaccccgatagcaacgatgactaatggcatgatttacctggccttaatttgttatgggtaacgtcatagtttcaacattgacttcatccgttccgaccggaacaaaaaatgtctgacgccgtagaagctggctttatccttacccagagaaaggatagctggctatttttttatctgtggcgcctgaagtgaatgatacgggtaacatatgaagtttgagaatcacctgggcggtgaaaatttcaaatatgagacttaagtcatactctttcccgggtttctgccgggtcgcttagcgggaaatgttgcgcgggaacatgaggggagtcgcccggccgcgaaaaggctgccgggcggggaaatcagtagtaggagtgctcgccgcgctggtgttcagtcagatcgcgtacgcctttcagttccgggaactcgttcagcatctgcttctcgatcccctctttcagcgtcacgtcaaccatcgaacagccgttgcagccgccgccgaattgcagaatcgccaggccatcgtcggtgatttccatcaacgtgacgcgcccgccatggccggccagctgcgggttaatctgcgactgcagcaggtactcaacgcgctccatgagcggggcatcgtcggacactttgcgcatcttggcgtttggcgctttcagcgtcagctgggagcccagctggtcggtaacaaaatcgatttcagcgtcttccaggtacggcgcgctaagctcatcgacgtaggcggtgagttgctcaaacttcagcgcggtatcggaatcttccaccgcatccggtgggcagtaggacacgccgcactcggcgttaggggtgccgggattgatcacaaatacgcgaatttgtgtcccttcttcctgatttgccagcagtttggcaaagtgcgcttgtgcagcatcggaaatacggatcatagcgttggcctaatagttgactattttactgggttattatacgcccatcagcaggggtctacaaggtacggcatatacaccatacctgaaccgtcgcggcgccgtttcgcaaaagcaggcgggatatctcggcgacggtgcttccggttgtgacgacatcatccacaatggcgatatggtggccctggagcgacaattcaagctggaaggcgtttttcaggttccgtttgcgcaatctggcgctgagctgatgctgggtggcggtgcggcgccggcgggttagcacatcgctgcgccaggcgcagtccagccagcgggagagcggtcggcacagcagatcgctctgattaaatcccctcttccactgacgacgctgccagagcggcacgctaattatccggtccgggcggggaagatcccgacgctggcgaatgcgcaacagcagcagacgcgccagcgccggggccagctcgggccgcttattgaatttcagctggtgaatcaggccgctcagcggcggtcgatagtcattcaccgtcaccagccgctgccacggcggcggtttttgcaggcagcgcccgcagggcagcgtgcttgattgggccggcaggccgcactgcgggcacaacggttcagacgccagcagcgccgacgcgcatcgcgagcagatcccccagctggcgatggccagcggcatttggcatagccagcataagctgtgtgctgttagcatatttccccctcgtattggtggaaagagaacagtaactgatgaaaacgatcgcgtggcagaccacgggcgaaggaaattgtcatcttgtgctgctgcacggatgggggctgaatgccaaagtgtgggattgcatcacgccgcagctggcttcgcattttacgctgcacctcgtcgacctgcctggctatggccgcagcggcggctttggcgcgatgtcgctggaagagatggcccagcgggtgctggaaaacgcgccggagcgcgctatctggctaggctggagcctcggcgggctggtggccagccaggtcgcgttatcccatcccgatcgcgtgcaggcgctggtcaccgtggcctcttccccctgctttagcgctcacgacagctggcccgggattaagcccgacgtgctgagcggatttcagcagcagctgagcgaagattttcaacgcaccgtcgaacgctttctggcgctgcaaaccctgggtaccgaaagcgcgcggcaggatgcgagagcgctgaagagcacggtgctgtcgctaccgatgccgtcgccggacgttttaaacggcgggctggagatcctcaaaaccgccgatttacgccagccgttgaccgccctcgccatgccgtttttgcgtctgtacggtcggctggacggtctggtaccgcgtaaaatcattccgcttctcgatgcgctgtggcccaaaagcacgtcgattgtcttcgataaagccgcccatgcgccgttcatttcacatccgcaggcgttttgcgctccgctgatcgagctgaagcgtgagatcgataaatttttttagcgggacgtggtaaaaacgctgggtgcagcaatacttaggttgttgcgggggttgactatttcacgctggccccgtgacctaaaaaaaacaacctaatggagagtagaggctatgaaacttgttacaggaattgttgcatctctggtgattggctccctgtccttcggcgcgttcgccgccaaggaaattcaaaaagacgaagtggctaagttgaacctgaccaaaattggttcgattaccacctccagaacaacctctccgatggatgcaaagcgcgatctgtcgaaaaaagcggatgagctgggcggcacctattttgtggtgattgcaggcgagaagaacgagaaaacggttcacgctaacgcggacgtctacaagtaagccagaaagcgggtctcaggacccgcttgcggtatatgccgcagtcggttcccggaagcggcgcgttgcgcctgtccgggctacccaccccagaaccgtacaaatctgtggtcgaatctcccgggtcgcggcgtaaacgccttacccgggctaccaagcccaaaaccgcacaaattcgtagcccggataaggcgttagccgcaatccgggaaacctgccttcacagcccaatcagcgcagcgaccaccactcccgcaggcaggctttgccttccgggcagcttttacagctgccggagaggcagccatcggcatcttcggtcactttcaccgctttccccatcgcttgcaggcggcccaacatggcgtcaatcagcggctgcggcgtattcaggcggacgctgagctgctttgcctccatcctcccctgcagggccagcatatcgcggacttcaattaatgacgccatcatcgctccttagtggcaatcgcccgccggactctggcagcaggtggacggcgttttgcgcgtcgccagcagcgagacgtccacccggctacgcgctctgcgcagcaggccaaagatcacgatattgaacagcaccaccgccagaatgcacgccaggctatagcgcggatgctggctaaagctgacggtctggtagtacagcgtagaaagtgaataggcgatattcagcccccacaggacggagaacatcatccagccgcggctcgactcgcgggcaatcgcccccattaccgagatgcagggaatatagagcaggacaaaaatcaggtagctgtacgccgccgcggcgctaccgaatttgctgcccatgacgcccatcgcgccggttgccatttcgccgtcgcctttactggcttcgatagggttggccagcacgctcaggctgaacgtatctttcaggctctgccaggtctcgtctaccgcggccagcagctcatcgccgaggctaaacgtctgcggattaaacgcttcgttctggatatcttcagcggtgtagagggtgttcagcgtccccaccaccacttccttggccatcgcgccggtgaacagcccgacggtcgcctgccagttatcctcatgtacgccaatcggtttaaataccggggtgatcacccggctgaccgacgccagcgccgagtcgttgatgttatcgacgatcttaccgctcagcgagaagctgttcagcgcgctgaggaagatactgacgataacgatcactttacccgcgcgcaggacgaagcctttcagacgctgccaggtctggataatcagactcttcacgtgcggaacgtgatacaccggcagctccatcacgaacggcgacgcttcgccgcgcataatggtatgcttcagcatcagtccggtcgcaatcgccatcacgatccccagtacgtacagcgagaagaccgccagcgcgccgttctggccgaaaaaggcggcggcgaagacggcgaaaatcgccagccgcgcgccgcaggacataaacggcgccatcataatggtcatcaaacgttcgcgcggcgcatcaagcgtacgcgcgcccatcaccgacggaacgttacagccaaaaccgacgattaacggcacgaaggatttccccggtagccccagcgcctgcatcaggcggtccatcacaaacgccgcccgcgccatatagccagagtcttcaaggaaagagaggaacaggtacatcatgccgatctgcggtaccagcggcagtacggtattgataccgccgccaatcccctgggcgaggaacaccgtcagccagtccgggaaatgcagggtatagccaacccactgaataccgtggataaagatagccacggaaccggcatcaaaaatgggctgcagcgcgccgccgatattaatcgccagcaagaacatcaggtacataacgaacaggaagaccggcaggccgaggaagcggttgaggatcactttatccatcgccgcggtaaagcggcttggctcggcggtaagggtgttactgaccgcatcgcaaatggcggcaatactttggtaacgggcatcggcgatatgcagcgcggggtcatccatctcttcgctcaggtgcgccagggacacgtccagcttgtgggcagcgtcaccggcgtaggcgcggctgtaaatatcgccttcaagcatctgtaaacccagccagcgacgctggcgctgcggaatatccgcggccatggcctgcgccagcttgtccgcctcccgcagcagcggctgcggatagtgcaccagttcaatagcctggttctgctgatggcgatcgatcgccatttttaaggcctcgataccgcgcccgcgggtggaaaccagcgggatcaccgggcacccgagacgcgcggccagcgcgtcgacatcgatgcggatcttctgtttttccgcgatatcgagcatattcagcgcgaccacgcaggggatgccaagctccagcagctgcagcgtcagatagaggttacgttccagattggacgcatcgaccacgttaatcagcatgtcggcgtcgccgctgagaatatagtggcaggcaatctgctcatccagcgaggtttgcgaggagatggtggtcagggaatacgtgcccggaaggtctaccagcgtgacctgatgatcggtggtgttgaaaccaccctctttgcgttcaacggtcactcccgcccagttaccgacgcgctggcgcgcgccggtgagctggttgaacagcgtggttttaccggaattaggattaccaattaagccaagggttaattttttcatattcatactcttagtgccggtcaggcattattgtgcaaccgcttccagctcaattaacgcaagatcctttttacgtaataccaggctaacgcgtcgggtttcaatatgaatagggtcgccgagcggcgccacgcgaaccacattgaaagaagaacccggcagcatcccgagggacagcagcttttgccgatacgccggactaatatcgcgggagaaaccggtgattttccacgcactatcaggtgtgaattgcataggacctacttgtttatcgccaactgaaaagagagttttccgtatgcgccggagacgcggcgccagggaccgtagctaacgaagaagaaaaaatactcaatgcaaataatgataatgagaatagtttttatcatcaatacatataatgcggccgtttcgctttttaaagagaaaattgagcttttgttgatattgagcaaactctattttgtcgccgtcgcggaggtgatgattattcttaatgactaaatgtttaattaaagtttctatagttaacgaaatgaaaataataatatcgccgtccgtaattcgcgcttattacgacgttataagaaaatactgatgcttgtttgcacaatatggcgaatgccggaagaaatgcggccccttagcaaaaggggccggaaagaattaacgttttttacccattgccgccgccagcgcatccatcatcgcgctgttgcccgcaggctgcgcctcgcgaccgcgaggtttagcggccttcgccgccgggcggttgccctgaggacgatcgttaccgccgccgcggcgcgcgttgctgtcgcctggctgttcgtccagacgcatcgtcagcgcgatgcgcttacgcggcaggtcgacttccatcactttcaccttcacgatatcgcccgctttgaccaccgtgtgcgggtcttcaacgaacttattcgacagggaagagatatgcaccaggccgtcctgatgaacgccgatatcaacgaacgcgccgaagttggtgacgttggtcaccgcgccttcgaggatcattcccggcagcaggtcgttcatcgtctctacgccatcggcgaactgggcggttttaaactcagggcgcgggtcgcggcccggtttctccagctctttgatgatgtcggtcaccgtcggcacgccgaatttctcatcggtgaagtcagcggctttcagatgacgcagctcgctgctgttgcccatcaaatctttcagcgcctgctgagtcgccgccagaatgcgctccaccaccggatacgcttccgggtgcacggttgaggcgtccagcgggttgtcgccgtggttgatacgcaggaagcccgcgcactgttcaaaggccttcggccccagacggctgaccttcagcagctgctggcgattctggaactggccgttctcatcgcgccaggagacgatattctgcgccatcatgcgggtcagaccggcgacgcgggtaagcagcgggacggaagcggtattcagatcgacgccaacggcgtttacgcagtcttccaccaccgcgtccagcttacgcgccagctgggtctggctgacatcgtgctgatactggccgacgccaatggatttcggatcgattttcaccagctcggccagcgggtcctggagacgacgggcgatagagaccgcgccgcgcagggaaacgtcgagatccgggaactccagcgccgccagctcggaggcggagtacacggacgcgcccgcttcgctgacgatgaccttctgcgcggtcactttcgggaactgcttctgcacgtcgaggaagaagcgctcggtttcacgcgaggcggtaccgttgccaatcgccaccagctcaacgttgtacttttcacacagcgcggcaaccgccaccgccgcttttgcggcctggccggtatgcgggtagatggtatcggtagccaccagcttgccggtaccgtcaacgacggcgactttgacgccggtgcgcaggcccggatcgaggcccatggtggcgcgcagcccggccggcgcggccatcagcaggtcgtgcaggttgcgggcaaagacgttaatggcttcgtcttccgcgcgttcgcgcacggtccccatcagctcggtttcgaggtgcatcagcaccttgatacgccacgtccagctcaccacgcccttacgccagccgtccgccggcgcgttattcaggcgcaggccgagatggtcgataatgatttgctcgccgtggctctctttcggcggctcgtcgaactgcgggtcggcatttaaagagagctgcagcacgccttcgttgcggccgcggaacatcgccagcgcgcggtgcgacggcacggtggcgatcggttcgtgatggtcgaagtagtcgcggaatttcgccccttcctcttccttaccgctgacgacggtcgccaccaggtgggcgtttttccacagatagtcgcgcacttttgccagcagggcggcgtcttccgcaaagcgctccatcaggatatagcgcgcgccgtcgagagcggcttttgtgtccgctacgccgttgtcggcgtcgatatatttagcggcttcggtttccgggtcgtgagagggttcgttccacagcagatcggccagcggttccagcccggcctcaatggcgatctgcccgcgcgtgcggcgcttcggcttgtacggcagatagagatcttcgagctcggttttactcaacgtcccgttgatggctttttccagcgcctcggtcagcttgccctgctcgccgatggacttcaggatcgcctgacgacggtcttcaagttcacgcagatagcccaggcgggtttccagattacgcagctgcgtgtcatccagaccgccggtgacttctttacgatagcgtgcgataaacggcacggtattcccttcatcaagcaggcgaacggcagcttctacctgttcagccctggcctgaagttcacccgcaataatgcggcagagcgaatcattcatcatcggtttaattcatctttaggatcaaaaatcagggggatagttatacggactggcacgctaaaatgccagccgcgacccaagcctctcggaatgttccggacctatttggctttgacgtattcaatttcgttcacgtaccaggccgcctcgcccgcgggggtgttcacgatagctaaatcaccgacctcttttttcagcagcgcgcgcgccattggcgaatcaatggagatgtagtcgttgcggccaaagatttcatcgtagccgacaatccggaagcgcttcgtctcgcccgcatcgttttcaatctccacccacgcgccgaaaaagaccttaccctcctgctgcggcgaataatcgacgattttcagctgctcaaggcacttggtcaggtagcgcacccggcggtcgatttcacgcaggcgctttttattgtattggtaatcggcgttttcactgcggtcgccgaggctcgccgcccaggtcacctttttggtgacttccggacgttcttcgcgccacagggtatccatctctttcttcagtttttcatacccttcacgggtgatcagcggcgttttcatcgaaggttccggctcctgattacagatctttgtgcaatgctgcgcacaattcgtcgcacgtcatcataccaacaggataaataatgtgtcttatgcttaaatgtatacttaagctgctgttaaatatgctttgtaacaatttagcctggaatatataccagatttcgctggtgggcgacccgggcttttttgagaatacgtactgacaattgcagtgaacctttgggagtataaacaatgcaagagaattataagattctggttgtcgatgacgacatgcgcctgcgtgcgctactcgaacgttatctgaccgagcagggcttccaggttcgtagcgtggcgaacgctgaacagatggatcgcctgctgacccgtgaatccttccacctgatggtgctggatctgatgctgccgggcgaagatggcctgtccatttgccgccgcctgcgcagccagagcaacccgatgccgatcattatggtcacggcgaaaggggaagaagttgaccgtatcgtgggcctggaaatcggcgccgacgactacatcccaaaaccgttcaacccgcgcgagctgctggcccgtatccgcgccgtactgcgccgtcaggctaacgaactgccgggcgcgccttcgcaggaagaagcggttatcgcctttggtaagttcaagctgaacctcggcacccgcgagatgttccgcgaagatgagcctatgccgctgaccagcggtgaattcgcggtactgaaagcgctggtgagccatccgcgcgaaccattatcccgcgataagctgatgaacctcgctcgcggccgtgaatattcggccatggagcgctccatcgacgtacaaatctcccgcctgcgccgcatggtggaagaagatccggcacatccgcgctatatccagaccgtttggggcctgggctacgttttcgtcccggacggctctaaggcatgaaacgcgtgcgcttttcgccgcgaagctcgtttgcccgcaccctgttactgatcgtcaccctgctgttcgccagcctggtgacgacctatttagtggtgctgaatttcgcgatcctgcccagtctccagcagtttaataaggttctggcctacgaagtgcgtatgctgatgaccgataaactccagctagaagacggcactcagctggtggtgccgccggcgtttcgccgcgagatttaccgcgagctgggcatttcgctctattccaacgaagcggcggaagacgcaggcctgcgctgggcgcagcattatgaattcttaagtcagcagatggcgcaccagctcggcgggccaaccgaagtgcgggtcgaggtaaacaaaagctcccccgtggtgtggctgaaaacctggctttctcccaatatctgggtgcgcgtaccgctgaccgaaatccaccagggcgatttctcgccgctgttccgctacaccctggcgatcatgctgctggcgattggcggcgcctggctctttattcgtattcagaaccgaccgctggtcgacctggagcacgcggcgcttcaggtcgggcgagggattattcccccgccgctgcgcgaatacggcgcatcggaagtgcgatcggtgacccgcgcctttaaccacatggcggctggcgtgaagcagctggcggatgaccgcacgctgctgatggccggggtgagccatgatttacgcactccccttacgcgtatccgcctggcgacggagatgatgggcgaagaggacggctacctcgccgagtcgattaataaagatattgaagagtgtaacgccattatcgagcagtttatcgactacctgcgcaccggccaggagatgccgatggagctgacggaccttaacgcggtgctgggggaagtgattgcggcggagagcggctacgagcgagaaatcgccaccgacctgcagccgggcgagatcccgctgcgcgtgcatccgctctccatcaagcgcgcgctggcgaatatggtggtcaacgccgcccgctacggcaacgggtggattaaagtcagcagcggcagcgaggggaaccgggcctggttccaggtggaagatgacggtccgggaattaaaccggagcagcgtgagcatttgttccagccgttcgtgcgcggcgatagcgcccgtacgattagcgggaccggcctcggcctggctatcgttcagcgcattatcgataaccataacggtaagctggaacttggctccagcgaacgcggcggattattaattcgcgcctggctgccggtgccgatgcagcgtgccctgcccgcgataaagcccgccaaagagatctaattctgccggtacgcccgcattaaaacgcccggcggcgccacgctgtacgccgccgcattgcccttgtatcccggagaggtgcgccagcaccgcctccggactgcaccaggtttaatgcgctttattcgccatcgcatacgccgctggcaaattcagccgctgccagaactgctgcgcgtcgttatcaccggaaagcggataccctgcgggcaacgccgttttgaccatcagcgcccgacgctgcgcggcggacagattcggcagcgcagcctccagcagcacttcagccccttgcggcaccttcaggctctgtttttcgcccttctgctgcggcagatcgtaggtcatggtaaagcgataaaacgcgaccatcgccgggtcgcgatacggatcgtctttcgcaggcactttcgcgcactccgccagcgtcgtgccgcactctttctccagcgcggtacgcagctggtcgcgggcctcattaaacagcccgcgatacttcgcgtcattcaggtagtgggcgacattgcgctgcgccaccatccgcgaccccatcacgtccagcggatagtgcacgcccagcacgatgcgcgaatagccatagcgtgcgccgcgcgtcaccagcgcgtcgaagcgctccgggatcatctccgccattagcagagcgtcggtatagccggtgttggtgtgcccgctcggaaacgagccgccgtcggcggtatagggcttattgtccttaacgaccacatcgtccggcaccagatggatggtattgccctgaatcaggaacgggcgcgggttgttaaagtgctttttcgccgccccggtactcacttccgaagctttgatcagcgccgccgccttaccaagctcgcctttgtcgtaggcggcgaggaacgctttgccgagacgcggccccagcgcatcgctgaggaagtagagatagctgatgccctcggcatccgccagcgcctgatggcgggaggtctgtacggcatcgcggttgatggcggtgaccgtcgccagattttgctcaattaccgccttcggcagcgcagtgaacgccgagagcagcgcaatacccgcctgctggttggcttttgtctggaagtcataaccgctggccttcagccacgcggtatccgcctgagttttattctgtctggcgtgttcaagctggtcgcgagtcagggttgccgcatcgcccttcagcgcgttgcgcagctgcgacaggctttggctctccagagcgtcaaacgccggactggcggcggctggcgtcacgccgttggcgattgccgccgcctgattcaaaggaacctctttcgccaatgccggcagcgccagcacgagcgccgatgcgagaagcgtgatgtgcagtttcattattttccttttataccctaaataattcgagttgcttaaaggcggcaagggagtgagtccccgggagcatagataactatgtgaccggggtgagcgaacgtagccaacacataagcagcttgaagtatgacgggtaaattcaaaccattaccttgcctttacgtgacgctagcccttctgtttgacgcttttatgacacggttatgttttgcaacgctttaagcggaatggaaacagcgcggcggtaatccaggccgatctgcggtaaactatcggtcatcttgtctcaatcccggaatcaccgtatccatgctcagttatcgtcatagctttcacgcaggcaaccacgccgacgttcttaaacacaccgttcagagcctgatcattgaatcgctcaaagagaaagaaaaaccgtttctctatctggacacccacgccggcgcaggccgctatcagctgagcagcgaacacgccgagcgtaccggtgaatatctcgaaggcatcgcccgcatctggcagcaggatgacctgcccgccgagctggagccgtatatctccgtcgttcagcacttcaaccgtagcggccagctgcgctactaccccggctcgccgctgattgcccgccagctgctgcgcgagcaggacagcctgcagatgaccgaactgcatcccagcgattttccgctgctgcgcgccgaatttcagaaagacgaccgcgcccgggttgaaaaaaccgatggctatcagcagctgaagtcgaagctgccgccggtttctcgtcgtggactggtgctgatcgacccgccttacgaaatcaaaagcgactaccaggcggtcgtgaccggtattcatgaaggctacaaacgctttgctaccggcacctacgcgctgtggtatccggtggtgctacgggcgcagattaagcgcatgatcaaagagttagaggccaccggcattcgcaaaattctgcaaatcgagctggcggtgcgtccggacagcgaccagcgcgggatgaccgcctccgggatgatcgtcatcaacccgccgtggaagctggagcagcagatgaacaacgttctgccgtggctgcataaaaagctggtgccgaccggcatcggccataccaccgtcagctggatcgtgcctgagtaatcgcagtcatcggtggaaactattgatttcaggtatacaatcgcgccaatcagacattaaggataagactcatgagcaagcattatgactatatcgccattggcggcggcagcggcggtatcgcctccattaaccgtgccgctatgtacggccagaagtgcgcgctgattgaagccaaagacctgggcggtacctgcgtgaacgtcggctgcgtgccgaaaaaagtcatgtggcatgcggcgcagatccgtgaagccatccatctgtatggtccggattacggttttgataccactatcaatcacttcgactgggacaaactgatcgccagccgtagcgcctatatcgatcgtatccacacctcctacgataacgtgctgggcaaaaataaggtcgatgtgattaaaggcttcgcccgttttgtcgatgcgaaaaccatcgaagttaatggcgagacgataaccgccgatcatattctgatcgccaccggcggccgcccgagccatccgaatatccccggcgtcgaatacggcattgattccgatggtttcttcgaactgccggcgctgccgaaacgcgttgcggttgtcggcgcgggctatatcgccgttgagctggcgggcgtgattaacggcttgggcgcggagacgcacctgttcgtgcgtaaacacgcgccgctgcgtagcttcgatccgctgatcgtggaaacgctggttgaggtgatgaacgccgaaggcccgcagctgcatacccatgccattccgaaagcggttgtgaagaacgccgacggcagcctgaccctggaactggaagatggccgcagccagaccgtggactgcctgatttgggcgatcggtcgcgaaccggcaaccgataacttcaacctcgccgcgaccggagtggaaaccaacgataaaggctatatcgtcgtcgataaattccagaacaccaacgttccgggtatttacgccgtcggcgataataccggcgccgtcgagctgaccccggtcgccgttgccgcaggtcgtcgtctctccgagcgtctgtttaacaacaagccggacgaacatctggactacagcaatattccgaccgtggtgttcagccatccgcctatcggcaccgtcggcttaaccgagccgcaggcgcgcgagcagtacggcgatgaagcggtgaaagtgtataaatcctctttcaccgccatgtataccgccgtgacctcacaccgccagccgtgccgcatgaagctggtctgcgtcggcccggaagagaagattgtcggtattcacggtatcggcttcgggatggacgagatgctgcagggcttcgcggtggcgctgaagatgggcgcaaccaagaaaggcttcgacaataccgtggcgatccacccaaccgccgcggaagagtttgtgacgatgcggtaagacgcgcaccatgcctgaaaaagaagctccggagagcttcttttttttgcctctacgccacgccgttattcccgtgacgcttaaacgccggccgctgattcagcgccatataccagcgctccacttccgccatttcaggatgggcgaacggcgtcattttccagcgatgcaccgacaggccaaggacaatatccgccagcgtaaactcgctaccggcgacccatgccccggtttgctgcagctgcgtattgacgatctgcacgcagcgggtccaggcggcaatgctctctttgatagccgtcggatcctgaaagcgcgggtccttgcgtaccagtcccataaaggcatagcgccaggcagtattaaattccgttgcctgccagtccatccagtgctcaacctcggcggcagcctgcggcgccgtggggagcaggtcttcccgcccggctttgcgcgccagatagcggcagatgctgttcgactcccataacacaaagtcgtcatcccgcagcacgggcaccaggctgttcggattaagggcgcgaaactccggggtctcaatcgactgaaacccgctgccgtaatcctcctgctgatattcaagccccgcctcttcgcaggtccacagcactttgcgcacgttaattgatgagcgtttgcccagtatttttagcattgtcagcaattcctcaatcaaaagagatgtttgtttcacaatactgcatcggcggcgcatgtacagccggataatgtgtatagtggattgcacgatttttctccaggacaggttacccgacatgttgacctcttttaacgttttaacaccgggcaatatccgctttggacgcggccttgctctcagcgccgccccctggctcgccgcccgctccgcacagatactgctgattcacggcgccagcctgcagcgcgcggcgttcttattaagcgaactccacgctcaccagctgaacgtcaccacgctgtctatcgcccatgaacccgacctgcaggatattgaacggggcgttcgtctggcgcgggaaagaggcgtcggcgcggtggtcagcctcggcggcggcgcggtgatagatgccggcaaagcgattgcggcgctggttcccgcgcaggggcccgcgatcgagtatctggaagtggtgggtaccgggcgcctgttagaagccaatccgctgccgttcgtcgccatccccaccacggccggtaccggagcggaagtcacaaagaacgcggtgatcaacgtccccgagcagcagcgcaaggtcagcctgcgcgacgaccgtatgctgccggacctggcgattgtcgacccgtcgctcaccgacaacaccccgcgcgcggtgaccctcgcttccggcctggatgccctcacccaggtgattgagccctggctgtgcgcccgggcgaatccttttaccgacgctctctgccgggaggcgatcccacgcggcatcaaagcgctcagaacgctgatggccaaagagtgtccggatagccgcgatgagatggcatgggtcagcctgtgcggcgggctggcgttagccaacgccggtctcggcgtcattcacggtcttgcgggcccattaggcggtctgagcaacgccccccacggcgcgctttgcggcagcctgcttcccttcggcctggcgctcaatgaaacgcaaattagcgacgaacgcctccgccagcgttttgccgacgtacgccagtggctggccgccgggctggacgccgatccaaacagcgcctgggagagcctgcgcgagtggagccagcgatccggtctgggcaatctgtgcgagctcggcgtcccccgcgaagcgctggaacccgcggccctcgccgccagcagctcatcctccatgaaggctaacccggttatgctgaccagcgagcagctgctggaaatgctggaggccgcgtgggagtaatggcttaatcgctaaagcgcctggaaatttagattttgttgcaaaacgaaatctccgaatttttcggcgcaatacgaagcggttaaaacggttttaatgctccaggtcaacgagttaaagcagaaaccccgggcagacggtttagaacaaagcgtgatctaccgcacacttctcttttcgtttcccgctgcgaatgtctaagcttaatagacaggtcgggcgcgcccggcatcctctactgacgcaatccggaggtccgtaccactatgttcagccagaaattacgcaacgttgatgacgatgagctcaggatcgaaatcgatccgtgctacgaagccgatccgtatgagttaaagctggatgaaatgttcgacgccgaacccgaaccggagatcatcgaagggctgcccgcctcggatgccctgacccctgccgatcgctatctggaactgttcgctcacgtccagaagtcgcgaattttcgccgatagcaaaaccttccccgactgcgcgccgaagcaggacccgctggatattttgattcactaccgtcgcgtccggcgcacccccggattcgatctccgtcagtttgttgaagaccacttctggctgccggaaaaccgcgccgaggattacgtctccgatcccacgcgatcgttaaaggagcatattgataatctgtggcccgtcctgacccgcgagccgcaggatcatattccctggtcgtcgctgctggcgctgccgcagtcttatattgtgcctggcgggcggtttagcgaaacctactactgggattcctacttcaccatgctggggctggcggaaagcggccgcgaagacctgctgaaatgcatggccgacaacttcgcgtggatgattgaaatctacggccatattcctaacggcaaccgcacctactatctcagccgctcgcagccgccggtgtttgccctgatggtcgaactgtttgaagaggatggggttcgcggcgccaaacgataccttgaccatctgcggatggagtacagcttctggatggacggcgcggaatcgctgatccccaaccaggcctaccgtcacgtggtgcggatgccggacggctcgctgctgaaccgctactgggacgatcgcgatacgccgcgcgatgagtcatggcgggaagatgtcgaaacggcgaagcactccgggcgcccgccgaacgaggtctatcgcgacctgcgcgccggggcggagtccggctgggattactccagccgctggctgcgggatatcacccggctggcgagcatccgtaccacccagtttatccccattgatttgaacgccttcctgttcaagctggagaacaccatcgccaacctctccggcctgaagggcgaccgggaaacagaggccgcttttcgccagaaggccagcgagcgcagggcggcggtaacccgctatctgtgggatgacgaaagcggctgtttccgcgattacgactggcgccgcgagcagctggcgctgttttccgccgccagcctcgtcgcgctgtatgtcggcatggcgacccatgaacaggccgacaggctcgccgacgcggtacgcgcccgcctgctcacccccggcggtattatggcgacggaatatcaaagcggtgagcagtgggataagcccaacggctgggcgccgctgcagtggatggcggtacagggttttaaaatgtacggccaggatcccctgggcgatgagatagcccaaagctggctgcaaacggtgaatcatttctataaacagcactataagctgattgaaaagtaccatatcgccagcgccaccccccatgaaggcggaggcggtgaatatccgctccaggatggctttggctggacgaatggcgtggtgcgccggcttatcggcctgtacggcgaaccgttgtaaaagcggactattcccgcggtcgatgtcctgctatgttcatggcatcgactttcgccggaagcccagctatgcctgaactggttaccccacgtctgcgctgctcgccgctgcagcttgacgactggcccttttttctcagcttacagcaagacccccaggtgatgctttacgtcgcggatccccgcccggtagcggacattcgcgacgcttttgatgcccggcttcccgcgtggtcgccgggcgctgcccactggctgtgcctggtagtgcgcgaccgctacacccacgctcccctgggcctcaccggctatcagcatcacgctcccgatagcgctgaagcgggttttctgttcgctccccgggcgcagggcaaaggttacggctatgagtctctgcgcgcgctgtgcgattacgctttctccgccggcggcatccggcggctgacggcaaccgtcaccgcgggcaatctggcgtcaaaaaatctgctgcaaaaggtcggttttcaccaggagggcgagctgcgcgactgctactggctcaacggtcgctggcacaacgattggctgtttggactgctgcgccgcgattaccaccagcctgggccatctggcgaatagggcgcgacgcgcttttcctctacactgcaggccgacaacagaggaagcgataaatgtccccaaccataccgccgctaagcctgcacgggctggagtttattaagcgaatgcaggggttagcgctcgccccctatcgggacgaaagcggcctgcgcgtgattggctacggccacgttctcaatgattacgaatcgttccctcacttcacgcgcgagatcgcggagactctgcttatcgtcgatcttctgcagtgccagcgcgaacttaagcgcaggctccgggtcacgcttaatcaagcgcaatatgatgcgctggtctcgttagcctttagctgcggggcggcgtctccggcgcttgataccgtcctgacccatcttaaccatcagcggttcgctgatgcgctgagcgcatgggaaaatattcgcatcggccgcgaacagcggcgcgaagagtgcgcaagattcaaaaacagagccgattaagtttcgctgacgcgatgaaaaaccatcgccgcctgggtacgattcttcacgtccagccgacggtacagcgactcaagatgggcctttaccgtgccggtgctgatatttaacgtccggctaatctgtttattagagtcaccggcggccagcagctgcaaaatctcacgctggcgctggctcaaatgaacccgtttattatcgctcacctccgccattattaatccatcgtccggcaagcagggcagcccccgccggagacgattgatggtctgagcgaaagtgggcaaactttcctcgcgctgcacgatggcccgcacattataagacagcgcgcgctgtagccagcccttattatcgtcagaaacgatcagcaggacctgagcgtgcggaaagcgacgctgtttttcctccagcagccaacagcaaaactcaccgtgcatatccccgtccagcatgagcagcgcgtcaggatgcgccgtcagcttctgccagagctgttcagcctgacaggtgccaaaaatatcaatctctggaatgtattgctggaggccaattttcattccatgaataaatatcgactgcctgtcaaacatgagtacctgcatgggtttcgctccaataaataaatgcccgacgaaagggcaacatcagccaaaataaataacaacgcgccgtttggcctggggcattttaccgataggggagatgaacgaaatatcataacaatgaatagttacagggcttattggccccattacttgtccacaatatttattacatttgaattaaggaaatccttaattatgcgggcaaggaaaaataaaataatactaattttctagtttaaacgaagccggaaacgcaggcgatggcgaaatgaggaaagtctgttacgaaataagaaagcgcatgaaatacgttagcccctccatactctatggaggggcgcgggattacaagaacatcccaccggagacttctacgcgctgggcgttcatccagcgcagatcatcgctaagcagcgcggcgatggcatcgccaatatcatccggcagccccactcttccgagcgccgtttgcgcggcaatatgctgattcacctgcgcgttatccctgaccacaccgccgccaaaatcggtttcaatcgcgccgggcgcaataatattgaccgaaattccgcgttctcccagctccttcgcctggtagcgcgtcagcacctccatcgcgcctttcattgaggcgtaggccgcatagcccggcagcgcgaaacgcgccagtccgctggaaacgttgaggatccgccccccgtactgcaataacggcagcaggcgttgggtaaggaaaaacggccccttaaactggatgttcattaattcatcaaactgcgcctcgctggtttcagcaaagggaatattcaggccaattccggcattgttcaataaatagtcgaaggtctcccgctgccaacgctgctgaagcacttctcttaccttctgagcaaaactgtcgaaactgccaacatcaccgacgtttagcggtaatgccgcggctttcacgcctttttgctcaatttcagccaccacgtccagcgccgcctgcgggttactgtgccaggtcagaataatatcggttccctttgccgccagcttcaatgcggcgttttttcccagtccacggctaccgccggtgactaaagcgatacgttgcgtcatcagaaaaccccttcttggttgcgtttgcatcgttgaagagcttattagctgctataaaaacaataaatatggcaaattacgttttactgtttcattaaaaacaacaataggccgccggcatggataaaattcacgcaatgcagctgttcatcagagtcgcggagctggaaagtttttcccgcgccgccgatacccttggcctgccgaaaggaagcgtctcgcgccaaattcaggcgctggagagccaccttggggttcgtctgctgcatcgcacaacccgccgggtacagctgacgcaggacggtatggtttattacgaacgcgccagagacctgctcagcaatcttgaagagctggacggcatgtttcagcttgacccctccagcatcagcgggcgtctgcgggttgatatgcccgtcgccgtagcgaaaaagctggtcattccacagctgccggcatttctgcagcagtatcccggcatcgaactggagctcagcagcagcgatcggttagtcgacgtggttcgcgagggctttgactgcgtggtgcgcgtcggtacgctgaaagattccgggctcatcgcgcggccgctgggcaagctaacgcaaatcaactgcgccagcccgcagtacctgacgcgcttcggctatccgcaatcgctggacgatctcgccgatcatgcgctgatccactacgcaagcagcctcggggtgcgcccgctgggcttcgaagtggtcagcgagggcgccgtccgctggatcaaaaccggcggcgtcttgacggtgaacagcaccgagacctatcaggcgtcgtgcctggcggggctgggcattattcaggtgccgcgggtgggggttcgggaatggctgcgcaccggcgagctgatagaaattctgccccactaccgcgccgagccgctgccggtgtcgctcatttatccgcaccggcgtaatctctcgcgccgggtacatctgtttatggagtggctgggcggcttaatgaaaaactacgttgattaggccgaataatgaaaaatctgtatttgagagcgtgccgatattccctgccgggtgctggctgacgctttgcatggcgtaaaaaccaacaatatcatgccattatcaaattctcccagaccgatacaaacgcagcgcagccggggaataacacaagaaagcgcttcagtgattcgcagattccgacgtccgatacccccgatacgccccatccgtgattttacgtatataatttttgaagaatatcgctgtaaaaaaggaagaaataatttatgacgccggaaaacgacgctcaacgcccaaccgaggatccgggccagcagccggataaaaacaaaagcgcgatggctgcgataaacgactctaccgtggcgaaaaaagccaaccaggcgctgaaaagcgtcaccggaacggcggaaaaagttcagcgtaaccatatggtcgcccatatcatccgcgccgcggagcgctttaacgacaggctgggtaatcagtttggcgcggcaatcacctacttctcgtttttatcgatgatcccaattctgatggtctcttttgcggccgccggttttgttctcgcctcgcatcccacgctgctacaggacatcttcgataaaatcctgcttaacgttagcgacccgacgctggcggcaacgctgaaaaataccatcaataccgccgtacagcagcgtaccgccgtcggtattgtgggtctgctggtggcgctctactccggcattaactggatgggcaacctgcgtgaggccattcgcgcccagtcgcgcgacgtctgggaacgcacgccgcaggatcaggagaaaatttgggttaagtatttccgcgactttatctcgctgatcggcctgctggttgcgctggtcattaccttgtcgatcacctctatcgccggctcggcccagcagatgattatctcggcgctttatcttgattatatcgagtggctgaaaccggcgtggcggctgattggcctcgcgatttccatcttcgccaactatctgctgtttttctggattttctggcgactcccgcgccaccgccctcgccgtaaggcgctgattcgcggcaccctgattgcggccgtcggctttgagataatcaaaatcattatgacctggacgctaccggcgctggtgaaatccccatccggggcggcattcggttcggtgttggggataatggccttcttctattttttcgcccgcctgacgctgttctgcgccgcatggattgccaccgccgaatataaagacgaccgccggatgccgggcaaagcccacgactaaaccatcactgggctgaataaaagacgcaaaattcagcccaacctggcatttcagcatataaatccaacatgtaacttttatttaacctaaacctggttttatcgaccattatttgaattttgtgaagcatttcatagaagttatttttctggcacagaaattattcactttttgcttcttttttcgcctctctcgccccttgttacagattgaaatgtccccaaggctgtggctatatggcctttcgttcgcaaaaaataagaaagatctatgcaagccacagccacaacactcgacaacgcgcaggacaccgttccggttaactcacgcaataaagtcgtcgtcgcctcactcattggtaccgccatcgagttcttcgacttctacatctatgccaccgcggcggttatcgtattcccgcacattttcttcccgcagggcgatcccgccgccgcgacgctacaatcgctggcgaccttcgctatcgcctttattgcgcgccctatcggttcagcggtctttggccacttcggcgaccgcgtaggccgtaaagcgaccctcgtcgcctcgctgctgacgatggggatctccaccgtggttatcggcctgctgcccggctatgaaaccattggcattatggcaccggtgctgctggcgctggcgcgctttggtcaggggctcggccttggcggcgaatggggcggcgcggcgctgctggcaacggaaaacgccccgccgcgcaagcgcgcgctgtatggctcatttccgcagctgggcgcgcctatcggcttcttcttcgcaaacggcaccttcctgctgctctcctggctgctgaccgaccagcagtttatggaatggggctggcgtatgccgtttatcttctccgccgtgctggtcattatcggcctgtacgtccgcgtttcgctgcacgagtcgccggtgttcgctaaggtagccgccgcgaaaaaacaggtcaaaatcccgctgggcacgctgctgaccaaacacgtgcgcgtcaccgttctcggcacctttatcatgctggcgacctatacgctgttttacatcatgaccgtctactccatgaccttcagcaccgccgccgcgccgattggcctcggcttgccgcgtaacgaagtgctgtggatgctgatgatggcggttatcggttttggcgtgatggtaccggtggcgggcctgctggcggatgcattcggccgtcgtaagagcatggtcgtgattacgaccctgatcatcctcttcgcgctgtttgcctttaaaccgctgctcggctccggcaacccgctgctggtctttgccttcctgctgattggcctgagcctgatggggctgacctttggccccatgggcgcgctgctgccggagctgttcccgacggaagttcgctataccggcgcatcgttctcctataacgtctcgtcgatcctcggggcgtccgtggcgccgtacatcgccgcctggctgcagggcaactacggtctgcctgcggtagggctctatctggccgccatggcggcgctgacgatgatcgcgctgctgctgactcacgaaacgcgtcaccaatcgctgtaactctccctccacgcccctggccatccggcgaggggcgtctccttgccgactattttttcatctgcgacagaattgcccgacactggttcgcctcgccttcggcgggtgagatcagcgccagcagcgcggcggccggcgtcaccagggtcgccagcgctgccgctaccgcgccgcgggcaatcagcggccccgccttcacgcccgcattcggcgacttaaaggtgccgcgcacgtagagcggtgaacgcagggtgataatgcgaaagcccttactctccggatcgatagtgaggtccagctgctctgaggcaaagctggcggtaccggtgacgttgatcagcgcgttttccgtatcaaaggcaaacacctgcggccgggcgacgccgttgaccacgtcgatattggccgccgcgcagttcacccgcacctcatcatcgccaaagatctgcccgatgataaagttaccgacgttcaggccgaggatctccatcaggttgcggctaattaaaccgtcgttcatcagcagcttcaggttaccgttactgttgcccagcagcgcggcgacggagttgccggtgccgcgaagctgcacatcgccgttcatttcgccgagggttttctgcatcatctccacgtttggcatcagcgctttcagcttcaggcggcgcgcctgcaggttcgccgtcccctgcagcggttttttatccccttcaagatgaatgctgccggcaatcgtgccgttggccagccccagacgcagcggctgcaggcgcaggtcgccccgttcgaggatcacgtgggtggagaggtcgctgatggggagcgtgccgccgtgctcaatgcgccgtcctttaaagcgcacatcggcatccatcacctgccacttatcggtttcaaagcggtcatatggcaacacttttccggccggctgcggggaggcctcgcctttgcgccgttcggtctggctgcctttaccgccggagtcgacgccaatcagcggccccagatccgccagccttaactgtctggattcaaggtcgccctccagcttaggccgggtttaccggtggtgtaagtcagcgagccgtggatatcgctctcgccgatgcggccattaaaatcctgataggcgaagcgtgaaccgtttttctccttgaaggtggcccgcagatgcccgtcggtcgaaaaggccggcgtatccggcagcagcacgccggtcaggtcatagagatcgcccagcgagtccccggaaaacttcagccgcagatcgacgccgccgaggttaagcggatcgctgaccgtgccggtaaacgcgacccgggtattgccggaacgaaaatccccctgcagggggaacggcgtcccttcgctgcgcagcgccagcatgccgccgattttgccgctaccggagagcggctgtccgttatagctccctttcgcctgcaggccgaagacgtaatcgcccactttctgcggctgccctttccccttctcgccggtcacttcactgaacgccagcggcttaccgagcggatcaaccacgatcgtcacgtcagcgcgcgacactttgtcatcaacggcaatcttgccgcgatcgaaaagaatattgtcgaggcggaaagaccagctggaaggcgccgcatctttctccgacgaccccgccgaagccaggtcgaaagtccagttgttgctcttctccgacagtcggatcagccgcgcgtcgggctgttcaagcttaatccacggcagatagaccgttttgctgagcagcgccagcggggcgagagtcgcctcaacgcgcggcaggtggaccatcgtgacctgcgggatatcaggggggttgccaaggacgatatcttcggcatgaacgtgcggccaggggatccagcttcgccagccgctctcgccgggctggcgttcccagacgacgcccagatcgccgcgaatcgcgaacgggcggttcagctcggcagagactttctggttgatcgtcggcttcaggcggttccagtcaaaggtcgccagcacgataaaaaacagaacgatcagtacgacaatcgttcccaggataatagccacggtttttcgggttctgctcatcccttctgcactccttttgcgtctcgtcactcctgaatatagttgagaaacgccatttgctccgccgaatgaggttttcgtcacataatccgcgtcaggtcaaaaaaataatggaacgttgttttaatatcattgaccatcaaagcgccccagcgcacactagggttaatattgatttaatttcaggtcatcactatgtcgaagaaaattgccgtcattggcgaatgcatgattgagctgtcagagaaaggcgcagcggttaatcgcggctttggcggcgacaccttaaacacttccgtctacatcgctcgccagaccgacgccagcgcgctgggcgtgcactacgttaccgccctgggcacggacaccttcagccagcagatgctcgaatcctggcagagcgagaacgttcagactgacctgattcagcgcatggccgaccgtttaccgggcctctactacatcgaaaccgacgagagcggcgagcgcaccttttactactggcgcaacgaagccgcggcgaagttctggctggagagcgagcagtctgcgaccatctgcgaagagctggcgacctttgattatctgtatcttagcgggatcagcctggcgatcctcagcccgaccagccgcgagaagctgctgaccctgctgcgggaatgccgggcgaacggcggcaaggttatctttgataataactatcgtccgcgcctgtggagcagcaaagaggagacgcagcgggtttatcagcagatgctggcctgcaccgacatcgcgttcctgaccctcgatgacgaagacgcgctgtggggcgagaagccggttgcggaagtgattgcccgcacccacgccgccggcgttgaagaagtggtggttaagcgcggcgcagactcctgcctggtggcgattgccggccagccgctgcgggaagtcccggccgttaagctgccgaaagagaaagtggttgataccacggcggcgggcgattcgttcagcgccggctacctggccgtacgcctgaccggcggcgacgccgaatctgcggcaaaacgcggacacctgaccgccagcacggtgatccagtatcgcggcgcgattatcccgcgcgaggcgatgccgcagtaattttcgattgcgttacgcccgcctgcgagaatcccggctggcgctgcgcgtagccgggctactgtctggcactggcattagaccggacaaggcgcgccagcgccgcctccgggaaaatcaccgggccaacccagcaatacgtaaaacagattagccataaacctcaccggatagccacgctatccggttttgctttactgcgctggcgggatatccgtcgcttcgttacgcccttccacaacatcaccggcggcgctcgacgccgctgcggccgctggcgcgggcgccatcagcttttcccacgtcgcctgcagttccttcatgttgtattccggctcaccctgcggctgctgcagcaccagcgccatatcctgcgacagctgctgacgcaggtactgattcagcatgtcgaccgtcagcgaattgagaaactcctggcgcagtttctgatactgctcgggcgcgatatccaccacctgattttgcaacgaacgcatccgctggctaatcaggatgtacgtatcggtgcgcgcataggtggcaaacagcttctgcagttcgaggtttttctgcgcgatcagggcatcaaactcctcctgcggcaggccgcgatcgcggactttcgccagctcgcgcgccacggtcgttaagttggcgttcaggcgctcgcccggcgattcgatattgatcgcgcactgggcgcgctggtagagcacgcggcagtcaaagccaaggccgatatccttgatattacttttgctcagattctgctgtacgtgccagaacagcgcttcccgggcaagatcgtcgcgccagtagcgctgcagcgcgaccgagtcgcggatcggctgccacggcgcatcccacatcagcgacagcttatcctggcgcaccgcatcggtcatgatgctgaccggcgtcgtcggcagcggcgacagcgtaggaaccgccaccggcgtttcgcgcttgcccttcaggccgccgaaagttttgttgatttgttccgcgacgctgcggctatccacgttgccgaccacaatcagggtcatggcatccggcgtgtaccacttgtggtaatactcttttagctgagcaatatccaccggctgcttcagcggcgccgccggatcgtgccccagcatggtggagccttttagccgatagcgccaccagccttctttggtatccgcaggccaggttgccaccatgtcttcgccctgcagcgcgtggttgacggtttccggggagatcggcattttaccgctggcgctggccagccagctcagcgcctctttcagcaggtcgttacggttattcggtatgctcaggttaaacaaactgtagtcataagagacgatggcgggcggcagaggacgcttcgggtcaatactctgctgccatagcgaacgggcctgcatggtcgggaggccaccgttttgcgtcagcgcgaggcgcgggataaagtggctaaagccgctctgctgagtgctttcgctcagcgagccaatattcacggacaggcgaacttcgatacgatcgctgggacgctgcggggtggctaaaacctgccactgaaacccattcgccagtgtcccctgttgccaggccgggtccggctggagcgcttctgcctgcacataaccgaccgtcgccatcatcagcaaaccaccggttaagagtcgaatttttgtgccctgcatgtgaacccctgatgaacaatcctggttacaacagcggcccacgggagggccgccgaaaaaatatggtgagttaagtacgtcggttagaccacacggagatgaaaatgtcgcatgttgacgtgaaataaacataagggtcaccgccgcgcaagcgacagtgacccctaattatgcgcaggagcccgtagtccagcaagggacaacgggcctaacagatggatttatgaggataattcgtgcgatttgcttaccggagtacggttgttcagcacatcatccagctgtttcgcgtccagctctttgacccatttagcgacaactatggtcgcgacgccgttacccaccaggttggtcagcgcgcgcgcctcggacataaagcggtcgatgccaagaatgagcgccagaccggcgaccggcaggtgcccgacggcggaaatcgtcgccgcaaggacgataaagccgctacccgtcacccccgccgcgccttttgaggagagcaacagcaccaccagcagggtgatctgatggaaaatatccatatggctgttcgtcgcctgggcgataaacaccgccgccatcgtcaggtatattgaggtgccatcgaggttaaaggagtaccccgtcgggatcaccagccccaccaccgacttgcggcagcccagcttctccatcttatcgagcatacgcggcagcgccgactcggatgaagatgtccccaggacaatcagcagctcttcgcggatatagcggataaatttaaagatgctgaagccggtggctttggcgatcgaccccagcaccaccaccacaaacaggatgcaggtgatgtagaagcagacgatcagttggccaagctgcaccagcgtaccgacgccgtatttcccaatggtaaaggccatggccccgaacgcgccaatcggcgccaggcgcatgatcatattgatgatgccgaagatcacctgcgagaagctttcgataacgttaaaaatcagctggcctttgctgccgaggcgatgcagcgcgaaaccaaacagcaccgcaaacatcagcacctgcagaatgttgccgctggcaaaagcgccaattacgctgccggggataatatcgagcaggaacgctacgatgccctgatctttcgcctgttcggcgtaaaccgccacggccttcgcgtcgagggtcgccgggtcaacgttcattcccgcgccgggctgcaccacgtttacaatgatcaggccgatgatcagcgcaattgtgctcacgatttcaaagtagagcagcgccaccgccccggtgcggccgacggctttcatgctctccatcccggcaatccccgtcacgacggtacagaagataaccggggcaataatcattttaatcagcttaacgaaggcatcgccgaggggtttcatctgcgcacccagttccgggtaaaaatggcccagcagaataccgatcgctatggccgagagaacctggacatagaggcttttaaagaaagagattttcatagggtgtcctttggagataaccacagaccttgagggggtattgcgtccgtggcttaaaaataacacccatgaaacatttcagaaataacgagtgatgaaattgcaatgcaattgttaatttatttgaactgactcgcataagctaacaatgttgttacaaacttgcatcctcaacatcaccgggtaaaaaacgggccataaaagcctcaggcggcatggcgcagccaaaaagatacccttgcaccgtctcgacgcccgcctcctgcagccagcgatactgggtatcggtttcgacgccctccgcgacaatgtgcagattcagcccccgcgccagctggataatcgcgggcatcatgctgatatcatcgggcagcatatcgataaagactttatctattttcaggatgtctaccggcagcgatttaatatgctgcagctggcgcaggccggcgtagcccataccaaagtcatcgagggcaatccgcacgcccgcttcacgcagcggacgcagcagggaaataatcgcctgcgggtcgtctatccgacggctttcggtgacttccagtaccagcgtgcccggcgcgatacgatagcgcgcgagcagcgccagcatctcctcgccgcgatcgtgatgcagcagctgcagcaacgacacgttgaccgacagcggcaacataatcccctgattttgccaggcggcaatctgccggcaggcctcttccatcacccagtagccgaccggcaccatcagcccgcaggcttcgatacgctcaatcagatcgcccggcagcgaccagctgccgtccgcctgacgctgacgcagcagcacttccgcaccgcacacctcgccgctgtgggtatccacctgcggctgcagccagatggcaaactgctggttatcaagcgccgtcagaatatcgtgctcttccattaagcggcgctgcgctttttccatctgctgcggatcgaagaactcaatctggtttttccctttacgacgcgcggttacggcggcggaaaacgcccgacggtagagctgttcggcgttaatttcgccgttaaacatcgcgataccgacgctggcgcaggggcgcagctggatgccgtgcagcggcaaacgttcatttaagacagtgagtacttgcttacttaacgtcaccgcctgccagggttcgtcaatgccgtgggccagaatcgcgaagtcgtagccgctcacctgagccagcaccatctgcgccggaataatcgcccgcagcttttcaaccagggttagcagcagcatttcacgctgcgtctctttcagtacgccagcggtatcctgtagcgtttcgcaggcgataatcagcagcgccgaggcctgcggtcgcgcgacggtttgctccagcatggccattagaaaggctttgttcggcagctcggataccggaaaacgggtcgattgcaaagagagttcgtcgtgcaggcgcagcagcgtctgctgattacggttgtagctgcgcaccagcatgccgatttcatcgtcatgatggagacgcggcagcgtgagctgatggcccaaacgctcgtgctgcgggacatcgtttagctcacgggcgattttacgcagcggtcgtaccatcagacggttgatgcaccaggtgatcgccaccgtcagcatcagcaccagaagcaagtaagcggtcactaacgtcgccagcgcgctcatgacgaatttatacatgcggtatgagtcggcctggagcaccagataggccagcggctgtgggttagcgggccgttcaagggagtagataggcagcgaaatctgtaccggcagttcaaacatacgggtgatggttaccggtaccgggcgctcggggataaagcgcatccgcagcgcctggaactgattgggcaggacaacatccgcccggctgacgatgcctgcgggttgaatacggctcagaatggcttccgcctcagggatatcggctttcaggatagccgctgacagcggttcgcgaacggaacgcgcgatgctttctaactgcgtggccgtggtaaaacgactctgctgaacaaagtggaacagcagaatagaacagaagaccagtacaaacgccatggacacgctcgcgaccatcgccatctgtttaattgtaagtgaacggctgacgcgcaacggggttctccactgaaactgaacgcatatcgggtataggtccctctcaccgatcgttatcaggctgattatatactcaaattgttcgctcacgcccgcaaggcgcaaagcaatgccatcaggccgctttcccggaggcggcgcaatgcgcctgtccgggctacaaaatccgcaggcagcaccgacctgtagccccggtaagcatagcgcgaccggggaacattcccgggtggcggctaacgccttacccgggctacacgctcacaaccgccatcgggccggtagcccggacaaggcgcccctggcgccgcctccgggatgcagcgcgctacgctgcttccgcaccaccggaggggaaatcgggctgcctggccggaggcaacgagtatacgcgaagagcgccgcggagtggcgccctgtcgcataattcagcctaatccgctaccagtcggcataaggaaccaacggctgcggcggcatatccatatcgccctgccagccggaagccgaatagcgaacgtacagcagcgcatggctcggggtgtaatccttcgcctgctggatatccaccgccgccccgacaaaccagttgctggtcacccgtcgttcaatcagcgcccgtgcggtatagccgacgccagaactgctgctgccttcttccgtgagctggctggcatcatgacgatactgcgaaggaatcaaattgagcagcggatagcgcgcctcggttttggtgcgcgagtgggaccacgataccgagccccccagctcccatgaccagttcgccgtccgctgacgccaggtaaccggcgccgagaaggagacatattcctgcggactgtagtaaccgccctgacccagcgtatagccgctgagatccttatcgtagtgccagagcatattgttcaggccgacggtgacccggcggttatcttcgttaaccactttatagtagtagccggtcatccagcgcacgcgccagttgtcggcgacgtttttcccggtcaactggtcgacgcccagcgaagaccagacgccgttggcctcgcctttatcgtagctcagactcagaccgccgccgtcggcgcgcaccccgccccaggtcttgccggtatggccgtcgttagggttgtctttctgcccgccaaaggccagcagcgagctggagatggggcgtcgatggaggttcacggtgtagcccagcggaccaacgtcgctgctgtagctcaggccgcccaccacatcaacgacgttaaagcccatcggcgtggtgccgatatcgccgctccaggtatcgttcttccagcccaccgcgacgctggcgccgctatcgctctgatgtttgctgccgccgctacaggcgatttcaccgcaggtgccccagctcggcgaatagctgccgtcgctgttcgtcgaaaaactcccggcatccatattaaccagatcggtacggaagaacattcgcccgtcggccagcggcgcatccacatgcagcatcgtggtatgggctttcaggtcggaatagccgccggtaccgctggagccccagtaatcatgttcgagggtgacgttaagatcctgctgacgataaagatccgccgcgtcgctgcggatcccgcgcttcagccagtcatcgctgctgtcgttacgcgtcagccgcgtaaacgtgtcgttatcctgcgggcgctcgcgggcgacgccggaggccaccattgcatctttatagccttccagcgcctgctgcggctcgccgttctgcgcctggaaacgcgcggcgtcgcgcagcaccagcgcgctttccattgacggcggccacgctttcgcctgcggaacgatgcgggcgaaggtttgctgcgcctgagcgcgatcgcccaacccggcctgcgcctgggcgatacgccgctgcatattgatagaatcgatgtcgtcgcccttgagctgcgccacctgggcgcgggcggcgtttttatcgccatcggcaagatacacttccgccaggcccagacgcgcatcgccgttgtcaggctgctgccccagcacccgctgatattcagcaatcgccgtctggctgtcgccgcgctgctgcgcccagtccgccagcgtgagcgcgtagcgcaccgacgtcggctgctggttaatcagggcgatcgcccgggcttcctggccgctatcgcgcagctgattcgcctggcgcaacacgttatcgctttgcaggcgcgcctccagctcgcgaatattgtccgtccactgcccgcgcggcagggcgttaatctgcgccagcgccatctcatcctgattattcccggataggtagaggccgtaggcgtaaacccggtcggcatcgccgggctggcggttgaccatcgcgcgcatgatggcatcggcttcgctgcggctgcccgcgctgaccagatcccgcgacaggcggtaggcgatccacacgctatccggatccagcgccagccgtctgcgctgcacttccgccgcctgcgcccagttgccctggctctccagcgcttcggcctgtttctccagccgatcgttcgtcaggctgcgttcgatatcatcaatactgcgccgctggcccggcgacaggctggcgatgtacgcgctggctttttccggcgattcggcgcgatacagattcgccagaccgcgcaccgccaggctgttgctgcgatccattcgcagcgcgcgctggtagtagcgctccgccgccgcgttttctttacgcgccgccgccacgtcccccagccccagcaccgcatagctgtcggtattgtctatgcgctgcgcctgggcgtaatgattttgcgcctgcgccagctggccgcttttgagggcgctatcgccctgcttaatcagcagccagtagcggttagtcttgagcaggctgtcccacttatcgcggctcgggctatccgggtccattttgatggctttactcaactgggcaaccgcccgcgcccgatcgccgcgctgggagtacgcctgccccaatgcgccaaccgcgtcgctgtctttggcatccgcccgcacagcctgctgcaaatcggccacggccaccgaacctttcccggccttcaccgccgccagcccctccgcgcgatcgcggaacgtcgggtcttttagctgcgtctgctgctgagcgagcaggacgcgggcattcgccgaggtggaaccggtgggaaactgcatgagaaagcgctgcagcgcctgcacgctggcccggctgaccggcatacttttcacttcgttaaaccagatgtccgccgcgataccgcgccccgccgccgagcgggacatctgctccagataagcaaatccctcttccggcttattatcgccaaacatctgtttcgccagcgccgtttgcagcgggacgttgcccggcaagcgggcgttgagttttttcagctgattgatgccttcgttatgacgggcgggcagccgcgccaccagcgtccagtactcaatcgccgcgtcatcatcatcaggaacgccgttaaacagcttctcgtaagcggcgatggcctcatcaaccttcccggccacgcccagcagacgagcctgctgcagctcctggcgaccatcgccggtgctgcttttcatttcgtcacgcgaggctttcagctcgggcgattccggcgccagcttcgccagacgctccagctgctgcttcgcgccggcggtatcgccctggcggagaagatagcgcatccgcgcggcaacaacgtccgggttattcgggtcgatcaattccaggcgatagagcgactggcgcaccaaatcctcacgtttgctggcctcgccgaggcggacctgctccagtagatgttcctgaacaggcgtagtcgcggcgtgcgccagcggcatcagcgcgacgcctaaggagagggtgaataagcttagtgagaacttgtgcattcctggttccagtcaggccgtaattcgccaccggcggtgaagcgaaaacggtgttgatcccatccctggccgaaaagggtcaggaccgcgctgtagtaagcatccgcgccgggatagttatcggcgacgcgctggcgctgaatggcgcgcgcatcttccttctgcaagaaaggcagtagcgcagcggagaagccaaccggaccgttgccggtagttttaccggtcgcgatgttggttttttccggcggcacgccctggtcaatcgtccgggtcgccatcggtttaaaacgcgccaacaggcgagctttttgcttatcgccgtcatcgagcataccgacccacagatagacgcgaatggcgtcatagctgccgataatgggtttatccgctttcagctgccagcctttgcttttttcgtaacgcacccagtcaggcgaaaaacctttcggcgcggtttccagcagcagatgcagattgccgtcgcgtatcttcggccagggagcgccaaacgcggcaaagtaggtcgccagctgcggcggcagatagctgggattaaaacgccagccgcggtcatcgacgaagccaactctccccggcagaatcatcggccccagccccggtacggtggcgacctcttcgtcggcaatgcgcgccagcagcgccttgcctacctcggtgtactgaggtgtgtcccacagacgtccggcctccagcagcgcccaggctatccacaaatcggagtccgaggctgaattgttgtccagcaccgtccactcgtcatcgctctttttcccccacagccagcccgggagatgcgcgcgcaaatcgccctcggcaaggttgttttgcgtccactcgaacagcttgcggaagccgtcgcgatcgttagccgccagagcaaagaacagcccgtagctttgcccttccgaggtggtgatttttcgcgcatcgctggggtcgataattcgcccttcggcgctgacatactcttttttaaactgctcccaggccggccactggcaggcggcgctcacctgcgccgccgccagcatcaataccgataacaccacaccgcgcaccgcgttcatcatcaattactcatcatcaaggtcgaggcgacggcggctgataatacgcagcatgcgccatagcacccatgccagcagaacaatgctgaccgccgccagaatcgccaacagcaccggatggctggagagcgcaaaccagatacgttcgaaccacggaaggtgcccgatatagtaaatatcgcccaccctcaggctgttgacgcccgactcacgaatcaccgcaacggaaccaaacatcgccgcgcgtttaccgctgtcgttaagcgcctgggtcagcagttcgttaccgcgcgggctgtcggccagcagcgccacgacgctgcgctgatcgttgtacggcgactggaagccaataatcgccgccatcggcccggtcgacgtgacgtcggtgcgggtattcggcgttctggcctcggtatcaggatagatgctggccagatcgtagtggcgcatcggcgttttcacccagcttttggtcgcttcaaccagcaggttgattttcgtgtcgtccttcagcgcctgcggaatggagccaatcagcagcaggtcggcgtctttgtccttaatctggctgccgtcgtcggtcatgcgcaggttaatggccgccaggccggtttgcgcgccaatgccgccggccgtctccagcagcgtggcaacctggccctcggtcggcgatttgggcaccacgaccagggtatcggcgagatcggccatccggctgtacgggaagcccgcgttagcaaatacgcgcagatccggcatcgccataaagtgatagtacttcgagaaatcgatggtcgagtcgtcgcctatcaccacgtggttctgcaccggctggaaggtaatacagttatcgatagaaccgcccggcatcgggttcatatactggaagtcgaagcgcagctgattcatggcgccgaggcgcaatgccgggatcgtcacttccgttttgccgtccagcagcccctgcagcaccggcaggcgtagtaacagcttattcacatcctgcgagctgttgaggctgaaggactgtaagaaccgatcgttaaggctgatatccatgcgcgagctgtccttgataggcggcatggtgtagcgatagttcaggttcatatcgatgccgttggcgcgcagcaggtagaggtccggcggcaggttcagcgccacgttgatggaatccggcaccaggccgctggattgcagctgctgttcgtaggttttcagctcggcaaaggtcaccgcccgatcggtacgcacccagttcggcgcatcgtagggtttacgcgcctgcagctgtttgacatcgtcaaccgtcacgctgctgccgcggaacagaatattgccctgggctatccccttcgccgcctgcagcaggtctttgtcatcccgcccgaagaccaccagcagcttgacgtacggattatccgggtggtcgatcatttcaatcgtcggcgccttaaccggcggatgctcgcgcaggaagtcagggcgcttatcgttggtcgcaaacacaatggcgttacggtccggcagttggttgaactgcaccgggaactgctggccgcgccagcccgccttgctgccgaaccaggaggcgacgatggccgccgcctgctgctgcaggacacccggcgcggaggcaaagaccatcggtagcgtcagctggcggttatcgcgcgaatcgtagaacggtaccgggaaatgcgaaagatcgttgcgcacgttcagcgactggtaggttaaatccagatagctttcgcgaccgacgtccagccacaaggtgctgctggccgggttttcacagacatcgcgatagtggccgacaaactcaaggcgcacgcggttaaagtcggtgatatagagcggatcgatagggatctgcgcgctgacttttttacccaactgctctttagtgaccggcagcacgcccatcagctcatcgttaagataaaccttcagctgcgactgcaccggcagcagcgacggagagggcgtgtagtcgagattcagcagcgcttttgccaccacttcatcgctgcgcataccgaactctaccgacccctcagggcgcgcgccgcgcagcaccatgctgcccggcggcggggcgattttggcgaaggtcagcttcacgtcgcgggtcggagcgttatccagcaccaccaccggcgctgccggatcggcaagcgtcgccgtgggctggctgtccgccaccgtacccgcgataccggggaccatcgtcgtcggcccggcctgagtcgccgccgccgtcggttccgcatacgaagcgaagggagaccatccgctaatacccaccgctactgcacaaatcaaagagagttttctgttcatcaatatgcccccaggatccccccacctatggaggtgagagaggagtggaggcggttttcgtgcatgaatactgtatatttgatcactatcaataaccctcgcataattgtgcgtatcttgcgaaaccatgaaacgcgcatataaatttcgattctatccaacgcccgagcaggctgagcttctggccaggacgttcggctgtgtgcgtttcgtctacaattcaatccttcgctggcgcattgatgcctacaacgaacggaaggagaaaatgggctacgtccaggccagcgcccggttaacggccctaaaaaaagagccggaatttgcctggctcaatgatgtttcctgcgtgccgctacagcagtcgctgcgccaccaacagaccgcctttactaactttttcgccgggcgtgccgcatacccggcattcaaaagtaagcgccataaacaagccgctgaattgaccgccagcgcattcaaatatcgcaatggcaagctgtatatggcaaagagtaaagcgcctttagacgtgcgctggagccgtgaattgccgtctactccatctaccgtcaccctttccagagacgtcgccgggcgatatttcgtctcctgtctctgcgagcttgagcccgtatcactgccgatcaccgctaaaacggtcggaattgatgtgggtttaaaagatttgttcgtcactgataccggatttaaatccggcaatccccgccatactgctaaatacgcggcccgcctggcgcagctccagcgccgtttaagcaaaaaagccagaggctcaaagaaccgtgccaaagcccgcttaaaggtggcccgactccacgcgaaaatagccgattgccgtctggatgccctgcacaaagcatcccgcaaactgataaacgagaaccaagttgtttgcgtcgaatctctgaaggtgaagaacatgctccgcaacccgtcgttgtccaaagcgatagcagacgcaggctggggtgaattcacgcgccagctccggtacaaaggcgaatgggccgggcgttcagtggtcgcaatcgaccggtttttcccgtcttcaaaacgctgtagctgttgcggtttcaccatgaaaaagatgcctctggatgttcgtaaatggtcctgcccgaaatgcggggcagaccatgatcgcgacattaacgcggcccgtaatatcaaagcggcagggcttgccgtgttagcttgtggagtggctgtaaatccttaacccccctggggctaaggtcaccaccgtgaagcaagaatcccgctcctgagtcgagtcaacgcaaaggtgggggaatacgtcaacattgttgagccatcgccggttctgccgagagtgtcgccgctgcgcgttccggacggcgcggaataaacgagacaaaccaggccaccagcatggtgagcgagcggaaaataaccttcaccgacggcggagaaaactccgccaggtgacgatatccacggaaccccagcttcaggatatccagcaggctttccatcggcttatcttccgggaagctatcctgccaaagcgcccacgtatctgcgcgggcaaacgtacactgtacaaaatcaatatgctgttgattgcttaacggcagcagctgtagcccgacctcgctgccgttgacccgcgcgacccgcaccgggaaggcgtactcctgctgcccgcgtttcagcaacagcttgacgtgctggctttccagcacctgcgcctcgccgtgaatcttgaccccaaggcccccgtctgagtaatcatggacggtacaggagaacaggtgcccgtcatcgcgggcaatcgccgccggcatcgacatctccacgcggtgcgatcgccgcacctgcttgctttcaaccgagaccgccaccgcgccgccgagaataatcaggttatagaacacccagataatgctcacccagacggtcaggatttcgttttccgggccgtacataaagcgccagatccccaccccgacgccgaccaggttcagcagcacgaggtagatatagggacgagagatcacccagtcgacgtactcgtcctccaccagtccgccttttgccgtcacgttgaatttgcccttatgcgggttaatcaacgcgacaaaggtcggcggcgcgatataccacgccagcaccgtttcatagatctcgctccagaaagagtggcggtatttgccctgaatcttcgagttggtcaggctggcgtgaatcatatgcggtagcacgaacagggcgatcatcagcgctggcgcatagatgatataggcgtgcagcagcagaaacgccagcggcgcggtcaggaagatcagccgcggaataccggatagaaagtgcagcatcgcgttgacgtagcagatgcgctgcgccagcttcagccctttgccaaacaaggggttatcaaggcggaaaatttgtaccatcccgcgggcccagcggatgcgctggccaatatgcgccgacaggctctccgtcgccagaccggccgcctgcgggatacgcatgtaggctgaagtgtgcccgcgacggtgcaggcgcagagaagtgtgggcatcttcagtcaccgtttccacggcaatgccgccgatttcatccagcgggccgcggcggatcaccgcgcaggagccgcagaagaaggtcgcgtcccacatgtcgttcccgtcctgcaccaggccataaaacagcgtgccttcgttcggcgttttgcggaatcgtcccaggttgcgctcaaacgggtccggggagaagaagtggtgcggcgtctgcatcatcgccaactctttctctttcaggaaccagcccatggtcatctgcaggaacgagcgggtcggcacgtggtcgcagtcaaaaatcgacacgaactcgcccttggcgtacttcagggcgttgttgatattcccggctttcgcgtgttcatgggtggtgcgcgcgatgtagtgcaccccgacgtctttggcgaactggcggaactcttcgcgcccgccgtcgtcgaggatccagatattgagcttgtccttcggccagtcgatcccctgggaagcgtaaatggtgtttttcaccacgttgaggtcttcgttgtaggtcggcacgaaaatatcgaccgtcggccactgcgccatatcctccggcagcgggaccggctgacggttcagcggccagacgacctggaaataccccagcaccagcaccacccaggcgtaggtttcggcgaacagcagaattatcccgcacacgaggctcacgggatcatcccagttgagcgtcgaggtgtagcgccaccagatgtagcggcaggagacggtcagcgacagcacgatcagcatcagggccgaaaagcgtcccggaatgcggcgcaccagcagcgccacgccccacagcagcagcaggaaaataaactgcgagagcggattaaacggctgggtaatacagagcagcgcgaggattagcgagaaaaaggttatcgtgcccagaataagccgccgcagctttggcgacaggtgagccagctctttatgtttatccaggtgaccggtgcgggcgttaaccttttccggcagcttttccagccactgggcatagcgcccctggacgccctccagcgccgccagcgaacgccagttgatctttttatccggctccggcacccgcgtcgccagcagccacacgcactgcagcaggtagcgaatcgggtccagcgggcgcggccgatgcggattaatatgcgggaaaaactcgccgtgacgttcgcgaatagcctgccagcgaggcgtttccagcggcataaacgcccatgccagagatgcccacaggcagcccagcgcggcccacagccacgacgcgccgtgctggcgatagtcgcgatagcgctcgttcagccgtttcccgaccggcggcgccagcagtagggtgctcaggcgaatcattccgcccccttcccggcgtagtgcagcagacaccagttggccagcgtcagtatctcctccgccgccagagagtcctgccggtactcgccgagcggctgcttcgccgccagacactccgccatcgcctcatcacgatggatggtcaccggcagaatgcggcgctggctctccagccacagctgatacaaatcctcctgcagctggctgccgacgcgcagatcgttaatcaaaatatcgctattgaccggcagcgcctgctgatgcaggcgaatatggctgttgccgtccggatgcacgatgaccagcgtgcggtcgcagacgtcaatgagggagcgggtcagcggcgagtaaccgtccggcaggtcaatcagcagccagcggtgatcgccctgctgatggagcttctgcaccatcccggccatcggcgccagcgtcggctgaagctggtcaatgttcgcgcgctcgcccggcgtcagctgaccaaagggcaaaagatcgatatgcgaggtgtagcgcaaaccggcgtcgcgccagtcgctgccgtcgatcgtggcgcgcgcccagcccgctttgtggctgaaatcgacgttgaaaaaaaagcgcaacatgttgtccgggctggtgtccaccaccagtacggtttcaccgagtaattgcagcgcccaggccagcgcagcggtaatcgacgtggtgccggtaccgccgcgcacgccctgtaatcccagaatcgccatcgacggcttccttactttttctctgctaattcagccagtaatggccagcgttttagcgccgcggttaactgctcgcgtcgggaaatatcgtggtagtgaatatcaggcagggaaaatgcccggcttaacgccaggaaatcattttgaaacgtgtagcccaaagtcgcatcggtgggtacagcaggctcttttgctggcatttctctgtccgttggaaaatacaataaattaaaccgagaggcgtaagatcatccttaaaatatgtttacatgctaaaactgatgtcctttaatttcaatgttaggtttactctgacgctttcgctagtaaactaatcaagtgtaaatcaagtctcacgagggacgccgtggatatcgtatattctttgggtatttcatcattatgggacgaagtacgtcatatgcccgtgggtggagtatggtggctgaatgtcgaccgctatgccgacgcggtaagcctgctcaaccatacgctggctgcccaggataaacagagccaggttgcggcgatagtcatgggtgataacccaaataaaatcattgaactagagaaaaatcgcgggccagaaaagatcgcgttatttagcatgccgaaccgtgctgaggggctgcaagaaatgcaccgcgatttagtttgttccctcgaacctggcaattatttgtttattctgctatgcgctgaaaatgcctggcagaatataaaaagcgatgatttatgcaattgggttgagaaatcgtatcgatggactaattatcatcgttgttcattactagtacttaattccgggcacgatatcgataagcaactttcccctttattacgcgagtaccgctcgctttccggtctggcaagtattcgttaccagggggataaccacctgttcgatatcgcctggtgggggagtgaaaaaggcatcagcgcccggcagcagctcattgttcttcaggatgaaaacggctggcggctggcgcaggatgaagaaacggtggtgcaaccgcgcagcgacgaaaaagtcattcttagcaatctgcgcgtactggaaggtgcccccgcgctatccgaatactggacgctgttcgataccaacgacgccgttttcaacgccgggaggatggcgcaggcggcaacgctgatcttctccattacccagaacgaacagattgaacagctgggacgctacatccataccctgcgccgccagcgcggcagtgcgttaaaaatcgtcgtccgcgaacaaacgccgagcctgcgcgccaccgatgaacgcctgctgctgagcagcggcgccaatatggttattcccagcggcgcgccgttatcccgctgcctcacgcttatagaaagcgttcagaaacagcagtttactcgccatattccggaagattttaatactctgctgacctggagccagccgctaaaactgcgcggctatcagaaatggggggacttctgcgaagcggtgcacaatattatggccaacaccatgctgcccgccgatggcaaaggggtgatggtggcgctgcgcccggcgcccggcctgcgcgtagagcaggcgctgacgctgtgtaagcccaaccgtatgggcgacattatgaccatcggcaacaatcgcctggtgctgtttctgtcattttgccgggtgaacgacctggataccgccttaaaccatattttccctttaccaaccggcgatattttttctaaccgtatgatttggtttgaagataagcaaataacggctgaaatcatgcagatgcgcgggattctgccggagaactggaacacgccgctgcccatttcgcttggcaaaaatgaaaccatcaacgccacccatgacgggcgaagctggcggcgcaaccccgaggcgcaccgtctgtccattgatggggagccaaccttatgatgtctatcgccgatattattcagctggtcgtcctgtgcgccctgctgttcttcccgctgggatacctgacgcgccactaccagcggcgtattcgcaccacattaagactgatgttctttaaaccccgttatgtcaaaccggctggcgtgctgcgccgggaagcgacatccaggcaaggcaaatcaacgaaatgaccaaacccaaaacacccaccgcgtcgcttccgctctggcggtactggcgaggcttatctggctggaacttctactttctggtgaagttcgcattgctatggggcggatacctcaattttcatcccatgttaaacctggtgtttctggccttcctgctggtgccaattccgcagtataagctgcaccgcatccgccactggatagcaatcccgctgggttttatgttgttctggcacgacacctggctgcccggcccggaaagcattgccagccagggctcgcagattgccggcttcagcgccgactatatctgggatctggtgacccgctttattaactggaatatggtcggcgcgttcttcgtgctgctggtcctgtggctgtttatcagccagtggctacgagtgacggttttcgtttcagcgatcgtggtctggctggttgtcagcccgctgatgccctctttcaccctgtggccggcaggtcagccgacgaccgcggcggcgaacaccgccgttaatacgggcggtggaacggccatcgcgaccaatactgcaccggcgaataacgatattccgccgcaaaccgagccgccgacgtcggccaatctcaccaactggctgaatgccttttacgcttccgagcaaaaacgtaaaaccactttcccggatgcgcttccggccgatgcccagccgtttgatgtgctgataatcaacatctgctcgctctcatggtcggatattgaagcggccgggctgatggatcatccgctgtggaagcatttcgacctgctgttcaaaaactttaactcggcgacctcttacagcgggccggcggcggcgcgtctgctgcgcgccagctgcggccagctctctcatgcgaacctttatcagccatcgggcagcgaatgctatctgtttgaaaacctggcgaagctgggcttcacgcagcagttgatgctcggccacaacggtatcttcggcgacttcctgaaggagcttcgctcgctgggcgggatccagagcccgctgatggatcaaagcggcctgccggtgattttgcagggttttgacggctcaccggtctatgacgaccaggcaacgctgaaccgctggctgcagacgctggataagctgaatacgccgcgcacggcgaccttctacaacacgctgccgctgcatgacggtaaccactatccgggccagagcaaaaccgcggactataaagcccgtgcgcagaagttcttcgatgagctggataatttcttcaccgaactggagaaatcggggcgtaaggtgctggtcatcgtcgtaccggaacacggtgcggcattgaaaggcgacaaaatgcaggtttccggcctgcgcgatattcccagcccatccattaccaacgtaccggcggcggtgaaattcttcggcattaaggcaagacaccccgatgcgccgattatcattaaccagccaagcagctacctggcgatttctgagctggtggtccgcgccctcgacggcaagatgtttgacgaaaacgacatcaactggcagcagtatattgccaacctgccgcagagcgcggcggtgtcggaaaactccaacgccatcgtcattcaataccaggggaaaccgtatgttcagctgaacggcggcagctgggtcccttatccgcaataaacgaaaaaggccgcaggatgttacccctgcggccccgttcgggcgcatgctgccactagggcaggcagatacccaccggccggctacttccggttatccatccggctcacgataatgctgaccagaattccagcaatcaccggagccgccagatcgtcccacagcaccaggcccaactgagcgagcgtcatacagccgccttgttgcaatggcaaccgttcgcggctattctcgaattgttgaggttcgagattagcccccgatacgttgccaggttgataccaaacaacgtgcgggggttttctctttccagcaaccatctctctatgccgccggggttcaagcccccgcaacattgcgcctcaccgggcgagcccggcttgccgactattctactggcccgatcgggtacccgcactccgccattacgcgcggtgcgagacgcattccaggaaacttttttgttgcagcaatacaacgaaaaaggccgcaggatgttacccctgcggccccgttcgggcgcatgctgccactaaggcaggcagatacccaccggccggctacttccggttatccatccggctcacgataatgctgaccagaatgccagcaatcaccggagccgccagatcgtcccacagcagcaggcccaactgagcgagcgtcatacagccgccttgttgcaatggcaaccgttcgcggctatcctcaaattgttcaggtttgagagtagcccccgatacgttgccaggttgataccaaacaacgtgcgggggttttctctttccagcaaccaattcatctctgccgccggggttcaagcccccgcaacattgcgcctcaccgggcaagcccggcttgccgacgattctacggcgcccttcagatttcagcacccggctcgactgcgttattcgaggcgcattccatagtttacgcctggtctttatttgccagccataccagcagcttcaggctggcggagtaatagtcgtcctgcggcgtaatctgcggatcggcctgcgcttcgccaagggttaaatcgcgtaccgccagcagcccgccggtcataaaccacggcgccacttcatcggtattcacgtttatccacgccggcgtctgcagacgcggatagcgctggaaccagtttttccacggcgtcagcaggctgcttttcgggtcactccagtagacatacagcggaatacggatcgcatcgaagctcattcgcgtcggccactcttttgccggctccatcttaccgtccgctcttaaggccacccagtcgctgggaagctgcgatttcccccacgccattttccccagcagcgcctggccatcgctctgcagctttctccaggcggttaaatgcgtacgcgcggcgaaggcctgccacgccggaaagataaagtaggagggattaagattcaggtggtcgttgagatagaatccctttgcgcccggaagcatcacctgacgaccggcaaacgtgaccaccgtagacttcaggagcgaagcggttatcgcatccgacgcgctgccgtaggatttttcatgccactgctgctgcgcgcgcagcagcgcccaggcaatcagggtatcaccatcggtggcgtcatttttgtccgccaccggattgggcgccaccgggttatagcgccagtaaaacaacccgttatctttgttgcgtagggttttatcggtccactgccatagcttgtcaaaggcggagcgatcgttattggccaccgctaacagcatggcaaaaccttgcccttcggtatgggagacgttgccgttgccggtatcaataatgcgtccgtccggcatcataaaacgcgatttatagctttcccacgccgtatcggcccacgcgtggggaagcatcatcaccgtcgtcaccacgactgtcgctaaagcacgcaaggacataaattcacccttcagggatggaagtaaagaaactgaacgtcagagaccgaaaacagccgctcgcgctgtaacaccacgtgcgccgcgccgccctgtccctgtagccagcgggaataaagcccctcgagtatggcacaaaacgcattacaccagcggacgcggcgcgcttcatcgcggctcaccggcagcgcctgatggcgtaaccgcaggccgtcatcgctaacctcaacgctcactacgccccactgaaaacggcttagctgcgcattcatattggcttccagctcaccgagcgtttccgacgccggtagcggatgctcatcggccagcgcctcgcccatttgccgcagaaagggctggctctccagctcgcccgcgttattgaccatgccatcaaccataatcagcagcagatcgaaccacccggcaggggtttgctgctgctgaaaccaggccattaccagcgcattgttattgtccgtcacgatcagcgatctcccagcatgtagcggatatagaggccggcggtgctctcgttgtaatcgccgaaggtgtcataacccacctggccgccgagcgtcatctgtttattgactttgtaatccgcgccggcgcgcagggtatagccgatgccgctcttcgaggtggctgaatagtaggcctctttagcaaaaccgttgctaacagcggtctcgagcgtttgctgccactcggcgttggtcgggaaataggcgctcttatcctggctgtaagattgataccccaccgaaccgccaagcttcatcgtccagttatcatatttctccgtcaggctcaccggcagcgacacgctgacgtagttctgcgggctgaagtagcccccttgcccgtaggtgaagtagctcaggtttttcgagtaatccatgtagctcatactcagcccggtctgcagctgacgatactcatcgtggtaaggccgcagataaaccccggcgttggcgttgatgctggtattgctggcgacgttttgtcccaggtagctatagcccccgccgccgacgtagaaaccggcatcgccatcgtcgtagctgagctgcagggtaccgccgtttttggtcacctgaccccaggttttgccggagtaggaatccttcagccccacccaagagagcaggctgtcggtcagcgaacgacgctcgccggtaaaaatcagcgacagatagttagtcagcttcggcgaccacttcacgccgcccaccacggtattcagatcctgacccagcggcgtgctgccgatatcgacgcgatattcgtcgccgctcagcgccaccgccagcgccacgccgttggctttttgtgaatcggttgagccgctggcccgatcaacgttaggtttcagatttgaagaagccagatagctggcgacctgcccggaatcgtaagcgcccagcttcgccaggttctccatgccgctgctggtggtggcgttaaagtctgaagcattcagcgtgccgagaccgctcaaggtctccgcccccggattgttggcaaagtacgtcgtgcgctcggtatcggtcatcgccgcaatcgccgcctgctcgctggtggcggtggaaatcatattggagaccgcgtttgatagcggattcgcgccatagcgccgccaggcgtccccggttgccgtccctgcgttcaacgtaatcggcgtcacggtaaagtcgaaacgcgaatcaccgaacggtgaagaggaccaggtcagcggggttttgatttcggtcagcttgctggtgccggattcgccatcgcggccgcgaacctccatgcccccctgcagccaggtcccggttttttcctgcaacgtctccatcatggtatccacctggcgcagcatccgggtgtgcgcggtttcgaccggcagatcggtgcgctggatccccggcagcgtgctgccatcgcccgtcgatacctgtgaaacctgccacggcatatattgcccgtaggtggaggcggtacgcgtcgccgccggcgtgcgcgagacgccgacgaacggattatccgccgccagcacgccgcccacggtcggcgtttgcgtgccgttgctgctctgtaaccccagcagcctgccgcgagcgctgcgcagataggtcatcgcctgctgatgatggccctgcgattcggccacgcgcgccagcagcagcaaacggtccggcgaattatccgggcgcagcccgcctgccagctgcgccgcccggtcgttatcgcccgccgacagcgcgacatcaatagccccgctgcgcgcgtcctgggtcggcgtatcgcgggtcatcaggtagtcatagacgaccccggcctctttattcattttgccgctctgatagagacgcgccatggcgaacatcaggtcggtattttgcgggtcgctctgcatggcgcccatcagcttgtcatacgccgccgcgtagttaccctgctcgcgcaggcgatccgcgtcgttaatcacatagccgttgcgaatgctggccagctgcgtcggcgtactgcttgcctgcagctgcggattagtgagcagcctctgcgcttcgttggtcaggccagcctggttaagcaccgtcacctgatcggcgtaatccccggcgttgccggagataccgccgttaatattgttacgcaccagcgataccgcggtagtgacatcgccgctctgggccagcaggcgcgccagtttaccgacatccgccggggcttttggcggcgtcgcggccatcgccctcagcgtattggacgccgcgacggaattaccctgcgccagatacccctcggccgtcgccagctgcaggttgtagttcacccgctggtgcaaatcgcgcatctggctggtctggctggcggggggaattcttgccagcagcgtttgcgcctgctgccagccgccgttctcgctggcgaaaagggcggcggcgtacagcgagctgctgctggcgccgggacgatacgcggcgcccatcatcgcgttcgcctcgccgtcgttaccggatttttgcagcagtcgggccagatcgaggcgcatccacgcatcgtccggatagcgagaaacgccctggcgcagcgtggcgatcgccccggacacgttaccgccgccggcctgctcctgggcctgtcgacgcagggagtctcccggcgtcccggtgaccacgcgcggctgcagcttttgctgcaggctttccggcagcgttcgcagcatcgactgggcttccgcagttttattctgttcacgcagaacgtaatagagattctcccgggcggggccattttgcggctgctcgttgagcagcgcccgcagcgtttgttcggcctggggcaggtctttgttgtggcgcagaacgtcggcgcggaacagcttcgccgccgagccctgcgtcccgctctgctgcgccagcggcgcggagagcgccagcgcctggctaatgttgccttgcttataggcctgctgcgcctgagcaagctggccgtaaaacagcgcatcccccgcctgctgacgccgggtttcagagccctcgccgccgagatccgccgcccggcccaaatactgagaggccgcctgaaaatcgccgctgcgctgggcgatatagcccatcccggcaagcgcgtcagcgtcctgcggattggtttgcaggacctgttcaaactgctgcttcgccgcggcggtattgccgctgttcaggtcagcgtaaccctgaccgcgcgcctggccgctgcgccgttcgcggaagtagttctgcacttcgctatcctgcggatggcgctgcatccaggtatcgtaaaacggctcatctcccggctgcggccccatccacagcagcgcctgacgcagtcccgcatcggcttctttgctgccgctggccatcggctccagcatggcgatcccttcccggcgggtctcttcgcgccaggtcagcgccttgccgagggccacgcgcggcccgttctcctgcggatgctgaacgacgtactgacgcagttcgctcaacgcctgcggatagagcgatttgtcgctggccatcgtcatgtagtattccgccgccagtccggaaggcggaacgctgccgttgaacatactccgccaggtcgccagcgcggcaggcacgttgccgctgcgcgcctgctgtctggccaggttgagctgcccctgcgggacctgcgccatttttttggcgctatccagatcctgcaagccgggactgttgggcgccgctttctccagtcgcgcccgccactgggccgcggcctgcaggttgcccccctgctgcgcccacagcgccatcaggtacagcgcctgagcgttgttggcatccaccgataacactttttgcagcgattccatcgccagctcgtcgtgcgatttttcgtgccagtaattggcctgcgcaaacagcgcctgcagcgccgcatcgttacccgccgcctgcgcctcgccgaaggcgccgagcgtcagcgcgccggacaggcacagcgtggaaaattgacgggccgccttcgtattcattttactgactcttttcattggctatctcccgactccaggcgcttgcgggcatgacgtttgaacatcgcggtcagcgccagacccagaatggacgtggcgattaaccccagcaccgccagcaggccggagtgctggttggcataccacaccgccatcatgtaccacggcatctggccgctggggaacggcgtactgacctggaagctacgcacgccgttatcgctggtaatcaccgccgtatcgccgcgaataccggcattgatgcgcggtgaattaagatcgtcttccagtttcgccagctgatcgtcgctgctggccatcgccaccacgaccacccgctgcgggttccacggcgagcgatagctaataaacccgcgccaggcgctgctggaagagaaatagcgatcggcatccacgccgtcggaggcccagtcgccgctcagcctgcgctgaatttttgtccatagcgccggttcacgtacgctcagcaggttatcgaccggttgatagggagaatcggccagcaggcgctgattaaacgctttctgatcgagggcgctcaccgccaggacatctcgatcgcgcaggaacagcgcattcgcgccgtcgtcaggaacgcccagcatcacgcggttattggcaagcgctttaccggtcgaattacccgaacgggcggccagattcagcatcgtcgcgacctgcgtttccgaaggctgttccggcagcagcagcgtggtttgcgaataatccgccaaccgggagaacgggaacgacgcgccgacaaaataggaaagattcggcagcagcgagaagtgccgcgtaccgctcaaatcgatccacgagtcgtcggtgatgcggctcttaatcgtgctgttcagcaggaccgaacagggcgcgctgtccttcggcaccagattgaaatagagcgagagctggttatcgccgtaaatcagatacggcgccagcgggatagtgaaccgctcctgacgcgcgtcgccgcccaggtgacgccagagcttctccagcggaccctgtttattcatcggcaggttgttgaggaaggtgttgttgagcgtcacgctcagcagtgacctatcctcgttaatccagctctccgacgggaaacggtagccgatctgcaggggtatggtttcgccatcccacaggtagaggtccggcgcggcgcggaaggccacgcgtagcggttcatgccatacgccgctgacggtcatactttgatcctggcggatcagctcgctgatttttaccggccgatcggtggcgatccagcgcggggcatcgtacggcttgctgacggctatcgtctgcggatcaacatccatgctggccgtctgcggggcgaaatcgccgcgggtcaggcgccaggcggccatccgcagcgccgcgtcgttctggccgacgatgagcagcagcttataggccggattgccggggttctcaacgatccgcagcagcggcctgtcggtttgcggcagcgtcaggccgcccacccgatcgccggggtggccgatgataataccgtgcttctcgggcaggcgatcgcgcagcgcgtcaaaagcgataccgcgataatcggcctgaatacccagccatgacgacaccagcgccgctgcgctgaagatatccgccgttggtttctccggatacgcgatagcgatatccgccggcgtcatctgcatgctgtcgaaaaacgggcgcgggaaatggcctaaatcgttgctgatattaagctgctggctctcccagctaaagtgggaggcgggtaaaatggtcacccgcgaggtgtcgtgaatatcgagccggcactgcattgcatcgccgtcgttaatcttaaagctcaggttgttgctggagaccatcagcgccgccggaatatccagctgatagtgcgagatctcctcgccgtccgcgcccagcggcagcgtgccgagcggctggccgttgagcattaactgcagcgtggcgttgcgggacgccatctccggcgagaccttaacatccagcatcagctgggcatgggtgaccacctgatcggagggcagcgtaaagctggcgccgccctggttttgtccaccgctaaggatgataccgtccggcatgcccatctgcatgaggttcaggtctccgccgacaatcggcgttagcggcaccgtatcagcgaccccagaggcaaccggcgacggcatcgcgggtagcgaagccggctgagggacgtttgccggcgcgggctcggtcgtggcgggcgaattcgcttcgctggcaggcgccgacgcgccgctggcttccgcatcaggtagcggaaaattaagcggcggcaatgcgtcagagggcgtttcctcgctatgcagcgctggcgcagagagcataccggccagcagcgcaagcgtcgttaaacgtttcataggctgccatcctcctgcgcgggattcgccgcaggcggctgacgacgctggctacggcgcgtcttccacgtcagccagaacagttcgaatacgcagcgcaaaatggtggcaaaagagcggaacgggttgtcctgcgggcgcggcgggttaatccacgcatcggcgcgggccagcaccacgcgcaccagctcgcggcggcgggagagctgaatgttttcatcaaattgcagacgaataaactggtcgtcagcggtaacctggcgcaccgggatcgaaatcgcgccggactggagaatcagctcaatctcttcgatttcatcctgcaggtgacgcttatccggcgcgcttacgcggcagccgcccatggacaggtccgcggtgtggctgcgggagacaatgccgctggtgtagtggatcagtaccggaatatcgacatcaatacgaatcgtttttcgcacctgacgggtttcgcgcgccacggcaatggcggccagcaggaagatcaggctgtaaatcccccagccgacgttcagcgcgataacgttcgggtctgagccaaagtagtcgtgaccgatggcgcggacgataccgaccaccacccccaggcccagcagacaggcgacgaccaggtgcggtctgacgacggtaaagtcgaagtagcccacgtccagcaggccgcctttatcggtcacgttgaatttcccgcgtttggggaaaatcatggtcaccagcgtcggcagcaccaggtggaacgccagcacgatatcgtagatttcgccccagaagctgtaacgatagcgaccgttcatgcgcgagccgacatagatcgcgaggaacagatgcggcagcgcgtaggagacaatcaggctggccgaggagtagatgatattcaggttgaacagcaggtaggccagcggtgcggtgacaaagaccacccgcggcagggcgaactgataatagagcatggcgctgagatagcacaggcgctgctggaacgtcagcccacggcccagtagcgggttatccagacggaatatttgcgtcatcccgcgcgcccagcgggtacgctgaatcacgtgcaccaccagacgttcggtggctaagccggccgccagaggaatatccaggaacgccgacttccagcccaggcgctggaacttcagcgcggtatgggcatcttcggtcacggtctctaccgcaaagccgccgatctgttccagcgcggcgcggcgaatgacggcgcaggagccgcagaaaaaggtcgcgttccagttgtcgttcccctgctgaatcgggccataaaacagcatcccttcgttaggaatattgcggcccacggagaggttgcgctcaaaggggtccggagaatagaagtagtgcggcgtctgcaccagcgccagcatcggatcgttgaggaatccgcccaccgtcgcctgcaaaaagacgcgggttgccacgtgatcgcaatcaaaaacgcagataagctcgccgtgggtcaacgtcatcgcgtggttgaggttgcccgccttggcgtgtttgttatcgttacgggtgatatacccaaccccaacgtcggcggcgaataccgcgaattcattgcgcttaccgtcatccagcaaatagatttttaatttatcttttggataatcaatacactgcgcagccagcaccgtatcacgcaccacctcaagcggttcgttatagctgggaatatagatatctaccgtcggccacttgctcatatcatccggcagcgggacaatttcacgctttagcggccagaccgtttgcaggtagttaagcagcagcatcacccagatatagacttccgccagaaacagccccatccccagaatcgcttcgatggtggagttaaaatgcagggtctgcgtcagacggaaatacatatatcgggtcgacatcagcagcgatgtcaccaccatgatgacggaaacgctgcggtttttactgaaccccatcacaaagagaataccgatgctcagcaggccaaaaatatactgcttttggctgtccatcggcgtgatcaccaccagcacggcaatgggcgaaagtaccagtaccagcaaccagaaaagcgtctttttcattcagcagccctgcaattaaattaaagccctgacctgcgaggctggctatgcaccttgccgtcaccaatattgatacccaactgcgcagagatttttttggcaataatttcaatatcaaaggcggctgcggaggaggagttaaagtccaggatagacttctgggaagcattcgcttccaccacgctttcatcacgatggatgatgcccagcagacgatcgcccagcttttcttccattaacgccgtaacatcgcggctgacctggcgacggttatcgctctggttgatcacaaaatagtgtccgagtttatggttgagttcgcccccggtcagacgcagcttttccacgggcgccagcgcggacatcgaggcggtatccgccagcagcggtaccagatgcatatcggcaagcgaagtgagcgcctttagcgcgggcgaagggcccggcggcaggtcggcaatcgtaatcagtcccggataattgagtaatgccgccaggccgcgcgtcaggaaatgctcatcatggctcaggcgttcatcgaaggcctgccgctgcgcgtcgctcacgtcgccgtagggcaagacgaaaatattgctgccggcgcttaatacgcactggctccagtcatggagctccagcgctttcgcgacatagccgcgctcgtcgctgagggggacgccaaaatgcaggcgcagggcgttctgcacatcaaaatcgagggccagaactttactgcctgcgcgggccagcgcccaggccagatttgccgccagggtcgtttttcctacgccgcctttcggtgaacacacgcagatcaacggcatgtcgcaatcctctccaggagtgatttcagtgactgatctttatcttttgctaccggctccgcggttttggccgcaaaaagatgggcaaaaccctccgtcgtcggcgcggccgccggacgaggcctgactgccggagcagggacgctgaccggtaccggctgcgcagcagcctgagaaaccgccggctgggaagcgggcgtagccgctgccaggctttgcggcagcgcaggctctacggccactgcagcagtcatgtccgtcacgggggcgggctgcggcgcggagggcgggataatcagggacggtgcagccaaagagggcgccgggggagcctgaacgaccgcaggctccaccttgtgaaacatatcggcaggaacccgctgcggcagaggtaaggaaactgacccacccatggccaaagaagacgcttcctccgccggaataagttgattgagaataacccaatcccctttttcaccggcagcggcttctgatgaaaggtccttgaattttagactgtgtgtccgcgtcttttccttgaagcgctgcaaatcatcataatggttcatagataacctcatgatttaaatacgtcatatttaatctgttttaattgtcatcccacgccactaaagcgtagtttaatttgttgttttttgggcatttacccggcgttacggccgtcacaatacgctaactttagtcgcgatttgattattttggataggtcaggctggtgtaattccatagtggtagtgcggttacactaacagttctttttcaaaatgatagccccattttttgggcggctgcgccgtcaatccccccgcagcctgccaggctattagcagatcgtagttttttatactgtctgaattttaaaaaatggcgtaatacacgccaggggaaggctaaagagaatacattttaatattttttaaggcgtttagaaatcacttaccgcgcttaattaaaataataaaatagtgttcccgtccaaaataaatagctcaggatgttagctaaaaaccaggaatataaagcgttgaccgaacaacaaggaacagttttatgcatcgcttttgctgttaatttgctccggctaaagaaacaatcaagataaagtaaaatacattcatgtagttatcccggactcccgagatagcaatggttgtggcgtaaaatgccggtattgttcgttgtcggttgttccaacagtgctgagttatggttaaaaaaaaagccgaagcacaggcttcggctttgattatcgattgcctgaatcagctcaggggcttctcgccgttctgatcctggtcgaccgcaaagcaggctaccagctggccaccgtagtccttcagctgcggctgaagctgggtgcacgggccgaaacggcgacggcagcgggcgttaaacgcgcagcccggcggtggattcagcgggctcggcagctcgccggtgagcttgatgcgctcgcggcggtcatccggattcagacgcggcgttgccgacagcagcgcctgcgtgtacggatgctgcgggttgttgaagatttgatctttcgtccctttctccacgcagcggcctaaatacatcaccatcacttcatcagcgatatgctccacaaccgacagatcgtgggagataaagacgtaagaaagccccagatcctgctgtaaatccatcatcaggttcagcacctgcgcgcgcaccgaaacgtccagcgcggaaaccggttcgtcggcgatcaccacgtccgggtcaagcatcagaccgcgggcaatggcgatacgctgacgctggccgccggagaacatatgcggatagcggtcgtagtgctcggttttcaggcccactttggccatcatcgccagcgccttctcccggcgctgctctttgctcaagctggtgttgatctgcagcggctcttccagaatctgccccacctttttacgcgggttcagcgaaccgtaggggttctggaacacaatctggattttctgccggcgcagcttctgcgcctgcggatcgtgcttaagcaggtcctgtccctggtaatagagctcgccgccggtggggatttcaatcatcgtcagcagacgaccgagcgtggatttaccgcagccggactcccccactaccgccagcgttttaccgcgttcaagggtaaacgagacgccgtccagcgccttgaccaggcgttccggcgtgaagagccccttcttcaccggatagtattttttcaaatcggtggccagcaacagaggctgttgcgtggtggcctcatgcgtactcatagcccaggcctcccggcatcatcaagtgggtaatgacatttcgactggcgaccgccgttaagcaggttcagctcaggttcttcgctgcggcatttgtcggtcgcataggggcagcgcgggttgagcagacagccgctcggacggtcgtatttgcccggcaccacgcccggcagcgaggcaagacgcgctttatcctgagcgaactccggcagcgcgcgcagcagcgcctgcgtataggggtggcgaggcgcgcggaagatatcctccgcatcgccggtttccaccacctgccccgcgtacatgacgatgattttgtgcgccgcttcggccaccagcgccagatcgtgggtaatcaggatcagcgccatattctctttctgctgcagctccagcagcagctcgatgatctgcgcctggatggtcacatccagcgccgtcgtgggctcatcggcaatcagcagctttggccgacaggcgatggccatcgcgatcatcacgcgctggctcataccgccggaaagctggtgcggatagacgtcaagacgcgaagccggatcggggatccccaccagcgtcagcaggtcaatcgcccgctgcacgcgggttttcttgttgccgccctggtgcaccttaatggcttccataatctggtaaccgacggtatagcacggattcaggctggtcatcgggtcctggaagatcatcgccacttccgcgcccaccagctggcggcgctctttttcggaaatgcgcttcaggtcgcgaccgttaaactccagcttttcagccatcacccggccgggatagtcaatcagccccataatcgccagcgagctgaccgatttacccgagccggactcgccgacgataccgaccacttcgccctgatttacgctgtagcttacgcgatctacggcgcggaacggcgtcccttcgtctccgaagtgcaccgagagtttatctacatttaataacgccatctcgaacctcttactgcttcagtttgggatcgagcgcgtcacgcagaccgtcacccatcaggttaaatgccagcaccgtcagcaggatagcgacacccggaaaggtgacgacccaccaggcgctctgcgcgaactgcagcacgtcggagagcatcgtgccccactccggtgtcggcggctgcgcacccatgccaaggaagccaagagcggccatatcgagaatggcgttagagaagcccagcgacgcctgaacaatcagcggcgcaaggcagttaggaagaatgttgatgaacatctgacgcatcgcgcctgcccccgccacgcgggaagcggtcacgtagtcgcggtttacctccaccagcaccgcggcgcgggtcagacgcacgtagtgcggcagggcgacaaaggtcagcgctattgaggcattgacgatcgacggaccgaagatggccaccagcaccagcgccagcagcaggctcggcagcgccagcataatatcgacaacgcgcataatgaccgagtcaaccacgccgccaaagtagcccgagacaaggccgagcaccacgccgaggatcagcgacagtaccaccaccagacagcctaccagcagcgacaggcgcgcgccgtacatcaggcgcgacaggatatcgcggccgacgtcatcggtgccgagcaggtggctcacgctgcccccctcctgccagaacggcggagccagcagcgcatcgcggaactgatccgccggattatagggcgcgaggaagttggcgaagacggcgatgataatcatcaccacgacataggccagccccacgacggcgcctttgttgcgtttaaaatagtgccagaactcctgcagaggggtcattggcaccggcgcggcgacaactttattttcagtaatttgtgacatgatggccccttacttcttatgccggatacgcgggttcaccacgccgtacaacaggtcgaccagcaggttgacgagaataatcatcgtcgccaccagcagcaccccgccctgcaccaccggatagtcgcggcgctgcagcgcgtcaatcagccagcggccaaggcccggccaggagaagatggtttcggtcaggatggcccccgccagcagcgtaccgacctgcagaccgatcaccgtgaccaccggcagcatcgcgttacgcaacgcatgaacgatgatcacccgcatccgcgtcaggcctttcgcgcgcgcggtacggatataatcctcgcccagcacttccagcattgatgaacgggtcatacgcacgatcaccgccaggggaatcgtccccagcaccacggcgggcaggatcatatgcattaccgcatcaataaagtcgcccggctcgccccaaatcgcggtatcgatcagcataaatccggtcagcggcagggtatcgtcaaggaagacggtatcgctgatgcgcccggaaaccggcgtcaggttaagctgtaccgacaccagcatgatcagcatcatgccccaccagaagataggcatagagtagcctgtcagcgcgaggcccacggaggtgtggtcgaagatagagccgcgtttaaccgccgccagcacgcccaccgggatcccgacgatgacggcaaaaatcatcgcgcagacgcccagctccatcgtggccttaaagcgcggcacaaactcttgccaaacgggaatacggcttttcagcgagatgcccaaatcgccgtgcatcacgccccaaatatagttgacgtactgctgccacattggtttatcgaggcccatttcggccagcagctgcgcgtgacgttcaggggaaataccacgttcgcccgccataatcatcaccgggtcgccggggatcatatgaacgaaggcaaaagtgagaagggtaataccgataaatgttgggatgacaagtcccaaacgtcggagaatgaactgcaacataacccggattctctctggagacggcccgcctggtgacaggacgtctgtattgctcacaaatgtcaattccctctccccaaggcggggagaggggaaacacgctgttattattcgatagagacgttatcgaagtggtgtttacctaatggatcgaccacgtagcctttgacctctttacgcaccggctcatagacggtggagtgggcgacgatcagcgccggagcctgatcgtgcatcacgacctgagcctgcttatacagctcaatgcgtttgttgtggtcatcggtggcgcgagccggctgaatcaggtcttcaaacggcttgtagcaccagcgggagtagttagaaccgtcttttgccgccgcgcagctgaacagggtggcgaagaagttatccggatccccgttgtcgccggtccagcccatcatgacggtctgatgctcgcccgctttcgcgcgcttgaggtattcaccccactcgtaggtcacgatcttggcctggacgccgactttcgcccagtcagcctgaatcatctcagccatacggcgcgcgttcgggttatacggacgctgtaccggcatcgcccacaggtcgatggtgaagcctttttccaggcctgcttctttcagcagcgctttcgctttctctggatcgtaggtgtagtctttaacgtcgtcgttatagccccacatggtcggcgggatcaggttcttcgcggcctggcctgcgccctggtaaacggctttgataatcgcttctttgtttaccgcgtaggtcagcgcctggcgaactttgacatcatccagcggcttcttctcggtgttgaaagagaggtagccgacgttcaggcccggctgttccagcagcgtgatgtttttgtcttccttcatgcgcgcgatatctgccgggttcgggtacggcataatctggcattcgtttttctgcagcttagcgtagcgcacggaagcatcaggggtaatggagaagaccaggcgatcgattttcggcttggtgccccagtagcccgggaaggctttatagagaatgcgggagtctttctggtactgcagcagctggaacgggccggtaccgattgggttgaggtccactttctccggcgtaccggctttcagcatgttgtcggcatactcttttgacagaatagaggcgaagtccatggcgagatcggcaaggaacggcgattccggacgggtcagcacgaactggacggtgttatcgtccactttcttcacttcgctaatcaggtcaggtaatcccatcccttcaaagtattcatagctgccgccagacactttatggtacgggttattggtatttttttgtctgtcgaaggagaagacaacgtcatcggcgttcagcgtgcgggtcggtttaaaatctttattatcctgccacttcacgtctttacgcagatggaaggtataggttttcccgtcttcgctaacttcccatttttcagccaggcccggaatgacttccgtggtgccggttttaaattccaccaggcggttataaatcggcactgagctggcgtcataggtggtaccagaggtgaagagctgcgggttaaagccttccggcgaaccttctgaacaataaaccagggtcttcgcttgtacgcttgctgcgacggtcatggcaaccaggctcagaccaagcttcagcatccctgatttcttcaaggaaatactcattattctgctccaaatgtgatgttgtttgcatatatccgccagacctttatttatttttattcgtcatattgcgaactacggatgcgttggctgcgctcgataaccccggtcacatagtcatctatgctcccggagattctcacgcttgccgccttcccgcagctcgaactatttagaatatacccggtccggtcggtggtgcccgaaagcgttgagagagatggggattcctttcacaaaaacgactgagttgcagtacggattctccatgaaatgcccctcatgccctacaatctgtcaacagaatggggaaacgtcaatacagccaacctggttttacatccggtgtgagaattggcgggcaaagattaaaaaaagtgcaaagcgctatttccagcagagaaatttatgctagcggccaatagacagaataaacaccttaatattttccagcagccagtgataagcaattatggtaaatggtaaaaatttcttgcgatgtgaccaatatgtgagcgataaatagcgtgaacgttaaaacgcacagcggaaaatgctgaagttatccataagcttcgcgaaaaaagatcggagtatatataaaaaaatacaatggaagatgtcacaaaatagggaattggcgccaggaaatgagggtggaggcgttttcttacactcttagcaagcagcgtattttcccggaggcgatgctggcgcatctgtccgggctacacggcccgcagacaacgctgaacccgtagcccgggcaagacgctttgcgccgcccccgggagcggtgtgcagtacggcagcacttcccggaggcgatgctggcgcatctgtccgggctaccggcccgcagacaacgctgaacccgtagcccgggcaaggcgctttgcgccgcccccgggagcggtgtgcagtacggcagcatttcccggaggcgatgctggcgcatctgtccgggctaccggcccgtagacaacgctgaacccgtagcccgggcaaggcgctttgcgccgcccccgggagcggtgtgcggtacggctggatttcccggaggcgatgctgcgcatctgtccgggctaccggcccgcagacaacgctgaacccgtagcccgggcaaggcgctttgcgccgcccccgggagcggtgtgcagtacggctggatttcccggaaacgatgctgcatatcagtaaggacgacaaaaacaaaaaagcctgctcgttgagcaggcttttcgaatttggtcggtgatagaggataactcgccactacgtggctcgccctgcgggccgttgctgacgcaacgttctctcgctccgctcgagtcgaacctctacccccggaggttctcatcctcacaaacttcaggtgcaaaaaagcctgctcgttgagcaggcttttcgaatttggtcggtgatagaggattcgaacctccgaccccttcgtcccgaacgaagtgcgctaccaggctgcgccaatcaccgaatgcgggcgcatcttactgctgcgatacacacccgtcaatgccttattatgaaaaagtcgctcaagcggcgagaaactcgccactctgctactccttcttcgccgcagcgtcaggaacgtggcaccagttgttatattggttaatcccgccgtccggcgaagtatagccaaggcagcccataatagtgtcatacagctctacgtgacgacgcggcaccttcatggccgcctgctgcttcaggtgcgcaaaagaagctgcgtggtcgggcgacgccagatacttatccgacatccacaccagcatcggcacgcggaactgctccggcggcgccatcttgcgcggcgtaccgtgcaggtgttcgcgctcgttgatagactcgccgtggtcggccgcatagaaaacaatcgccttcttgtcccgcagctgatccagcacgctgacgataaagtgatcgacgtaggtcacgctgttatcgtacgagttaatcagctcagccttcgagcatttattatcgacgccgacgcactccggcttccactgcgcaaagctgcgcggatagcgctgggtatagttaaagtgcgatcctttggtatgcagaatgatcaggtgcttaccattgggattcttcgccagaccgcgcttcatttcatccaccagcagcatatcgtctacgctcttgccgcggttactcggctcagcgccaatctgctcgcgataggcgatattgttcgccatcgtgttgctatagaaccacatctcgctctgcatggcgtacaggttgccgctaaagccgagctggtgcaggacggcaaagacgttctgttctttcagcgtccgctgcgggttatcatccgccccgccctgacgaacgaacatacagcgcagcgacagcttagtagcggtatcgcaggagtatccgcggaaagcgaccaggtttttctcctgcgccagcttaggcgtggtattgcggctatagcccaggatgcccatatggtcccagcgggtggtttcgccgatgataaacaccacgtaagtatcatccagcccttgcggctcaacgtaggtgaattttttcgccggattgatcagggatttattatcggaagactcgtccacctgcgcccacgcgtaaagccccagcgctgatagccagttagacggcagataggagttagccaccaccccgccatagcttggcagatcgacttcggaactgcgctcaaagttcttctgacgaacctccagcaagcgaataggcccccagaccatcaggccagccagcagcacgatagtaatattcttcatccgctggccgggcgtacgaatttgacgcagcagggtgaagcgacagcggttgctccagataagcaccagcggcagcgcgctcatcagcaccagccagagaatcaggtgccagccgataacctctctggacaagtcgatgtcagtggtcatcaccgaggcaataatcccgtagccgatcaccacgttcaggaaggtcatgtaatagctggcggcggcggagaagagtacgacgatggtcgcgagaatacgccagacccggcggccaaacagcgacaaaatacgcagcagaaagaaggtgaccagaaaggtccctatcagctcaactgcacctgagagtcctttccagatggtaaactcctgagcgtacccctcgaagcggcggaagaatacggcagcgttcataaaccagccgatgtacagcgccagccagatactgagcttcagctgcgtcatcgttttaatgtatttcatgcaaaaaacctggaaaacgaagagataaaaccgcccgacttaagcgatataagtaagcaggttaataaagtgcgtttagcttggttataagaaacctctacaaagcgcgataagtagaccacagcggaaggaaaaagtatcaggagggaatgtgatccaaccaaacatttacaaaacatttggttggattggcactattagcttaggtaattaatcatcggggccgggataacacccggtttcaggcatgagcctggtggtaaatttcacttttcggctgacgaatcgttgtcgaaagcgccagagagagaatcagcagcgcaaagatgacgcagaaggtcacgtagaaaccgccgaacagggaagcaatcagcgaaccgcagatgctgccgataccaaagccgagataaatcacgccgtagtttttcgccaggttattgaggccaaagaactcgctgaccagcgacgggaagacggtaatcgtaccgccgaagttaaaggccacgcaggcgatagcggcgaagaacgtcatggcgttcagcggagcgaacagcagcgccgccataccgataagcgagacaacctgtccgatggtaatcacccggatgcgggacattttatcggacagaatgcccagaaccaggcgcccgctcaggttagcgatagagatcaccgtcaccgcgttggcggccgtcgcaacatcgagatgcaccatcccctgggcgatatctttcgccacgccaatcacgtacaggccgctcatgcaggcggtcaggaacatcaccgccagcatccagtactgaggtttacgcatcgattcggcgagggtgaagtcattttcgacgacgccgttgttggcggtagcggtgtggttcggcgcgtctgtcatcagcgtcgcgccaaaaacgatcatcaccagcacgatagcgccccagataataaaggttttttccaggccgaccgtcgccagcagatgggagtcaataaatttaaaacccaggctgccaagcccgtaagcaccgatggaaaaagccgaaatcagtcccttacgttccgggaaccatttgacgcagttcgacagcgtcagcaaatagccagcaccgtcggccagcccaaccagcagacccgcgctcagccacagcatcatcaggctgtttgaatgcgcggtaaggaagaacccgaggcccagcaggacgccggaagccatggtgacgcgtttaacgccgaaacgttcctgtaatttaccggccacggatgaagagagcgccaggccgaggcttaacaggccgaatgaaaacgccacctggcttaccggttcgtccagcttggcggaaagcgaactattgaacaaactccatgtataaaccgatcccagcgcaaattgcgtaatgatagtgccgagcagcgtaagccagcgggtgtattgacggtttgcagcgttcatagcagttgtcctgaataattaactgccgccaccataacgaagtcccctgtaagtctggggaaaaaaggcatgagctgccgctaccgcggaatgaaatgcattaaaggcggaatgaatggcattgcaaaacattcacgccttaacgatttatcgaaaagttagtgaccgctaccgctggaatatgcgtcattactgtaatgataaagtaaattaaacgtatcaactatgctacatatttagcctgaataactcgagtggcaaatggcggcatgccgcagccccatccgggtgaggctcagggatgagccgaatcacaagcgccgccagcgtatccgcaataaattaaaaattggcgctcacgcccattaaataaagatagtttgccccggtgggtaaattgtccgcctgggatagcgccgcccaggcggcaagatgagagttgagcgacatatctgcgcccagcgtcacgtcacgccaggcaccgtcctgcgcgcggttcgccccgccgaaatccgtcgtcaactcctggttatagctcacctgagcccacggatgtacgccccatagcttctgataatcgacccgccagcccagcgtattcacgtagccggttccggccgcattgcgggtaagcggcggcgacgtcagatcggaatgtaaactggcgaccgggccggacgtcatcccctcggtcagagagaaattccagccgacgctcataccgcgtgcgctatccaccggagagaccgcctgattaaacgccagtccggaaggatcgtcggacgcatttatccgctccgcgagaatatcttcatagcgcggttggtgatcgctgtcccatgtatagcgttccgcagtattactttttgtatcgatagcgatatattcctgttgccaggcattcgccccggcaacacacgacgcccagacggatacgcacgccgggaccaggaatacccggaggccattgcatttctttattatcattaatgcgactccaaaaagagccgaaacggcaaggttgctgtgtttttttttatgggtgtcctatccctgcttggggaataataaccctgtattaactattatctttatctttcagccgtcaagttgaacgactgagtttttatcacaaaagggagagacagatgcaacgttgcggatgggtcagtcaggatcctttatacattgagtaccacgataaggagtggggcgttgctcaaaagaatccccgcaagctgtttgagatgatttgtctcgaaggccagcaggccggactgtcgtggatcaccgtgctgaaaaagcgtgaaaactaccgccgcgcttttcaccagtttgatccggttcgcgtcgcggcaatggacgaagaagacattgaacgtctggttctcgacgccggtattattcgccatcgcggtaaaattcaggccatcatcggcaacgcccgcgccttcctggcgatggaaaaaaatggcgaacctttcgcagatttcgtctggtcattcgtcgataatcacccccaggtgacggccgccgccacgctggcggagatcccgacaaccaccccggcttctgacgcattgtcgaaagcgctgaaaaaacggggctttaagtttgtcggctccactatctgctactcctttatgcaggcctgcggtctggtcaacgaccacgtcatcgactgtttctgtcgctcaggaggccaggatgattcgtaactgggacgctaacgaaaccggcccgctgctcgagctgtggcttgagagtacgatccacgcgcatccgtttatcgccgaaagctactggcatgacagcctggcgatagtgcgcgacgtttacctgccctccgcgcaaacctgggtatgggagcaggacggcgtgctgaagggttttatcagcgtgatggagtcacgcttcatcggcgcgctgttcgtcgcgccggatgccgccaggcagggtatcggcagcgcgctgatcggcgaagtcaaaaaacactacggttggctaacccttgaggtataccagaaaaacgttcaggcggtgaatttctaccatgcgcagggcttccgcattgaagactgcgcatggcaggatgaaacccagcatccgacctggattatgcattggtcggcggatcaaatgccgtcagcgtaagctcgggcccggtatacttttccagccaggccagcgccgtatttccggcgcagccgttacccagccgcgatgtcggaatatctttggtcagcacgttcaccgcaccgtttttgcagatccccacctgagggtcgagatcgggccatgctccttcgtgcaagcagataaccccgggacgaatgccgtcggtcactaccgcgccggccagtacctggccgcgtgaattccatacccgcaccagatcgccatcggcgatattgcgcgcctgcgcatcgcgcggatgaagggttaacggttcacggcccgccaccgcgtactgttcgcgcagcggcgtatggttgagctggctgtggaggcggtgcgccggatgcgctgacagcacctggagctggccttcctgcgcattgccgtgccattcgtccggctccagccacatcgggtgcggcgggcaatccggataagcaaacccggcgatggtcggcgagtgtatctcaattttaccgctggcggttttcagcggattcgcctgcggatcggccctgaaggcggcaaagcgggcgaagcgcgcgttttcagggttctccggcatttcaatcagctgattatcctgccagaaccgggcgaacggcggcagcgtaacctgctgcgccgccccgcgctgggcggcaatctggtaaaacgtctccagccactgcagatcgtttttaccctcggtgaagcgctcccgcccgcccgcttcccagcgctcgctgaggtcggcgaagacctcgaaatcatcgcgcgcttcatcgcgcggcgcgaccacccgcttcatcggcaccagatgctggttgctgtagtcgccggtcatggtcatatcgttgcgttcaaatgaggtcgtcgcgggcagcacgatatcggcatggcgcgccgcggcggtccagaagcattcggaaatgacgataagctccggtttttgccaggcgcggatcagtcggttggtatcctgatggtgggtaaagttggcgccgcccgcccaccagataaagcggatatccgggaaacggcgttccataccgttatgttgataagacgctccggggttttccagcgcttcaacgatacgcgcgaccgggattttttccactgcatcggtcccgcccgccacgctgccctgcattgaggccagcaccgccgcgcggcgcgtagggttgccgccgttggcaaagtgataggaaaggccaaagcccccgccctgggtgcctatctggccgagcatggcggcaagggtcaccagcatccagtgtttttgttcgccaaactgctggcgctgcattccccagccggacatcaacatggtggtgttttcgtggaaaagttgtgccagttcgcgaattttctccgcgctaatgccgcagatcgccgccgcccattccgccgtttttgccgttccgtcgctctccccggtcagatagcgggcgaaaacgtcatagccgctggtgcagtgggccaaaaacgcgtcatcctgccagccgttttccaccagcgtatgggcgataccgagcatcagcgccacgtcggtgcccatatgcggggcgatccactccgccgcgtcgccaaagaattccgccgtttccgatcgcatgggatcgatgcagatcacccgcttcccgctctgacgcagacgatcgaaccacgggatgccctgctcatcggaagcgttccaggcaatttttagcgtatttaatgggttagcgctccacagcaccacgacatcgctatgttccaacaccattggccagctggtctgctgctgataaacctcattaccgccaaccacgtacggcatgatcgcctgggccgcgccggtggaataatcgcccagatgcccggtatagccgcccgccaggctcatatagcgctggagcagcgtcgccgctttgtgcagcacgccatttgagcgccagccgtaggagcccgcaaaaatcgacgccgggccgtagctttcgcgaatgcgccggtgctgggcgtgaatcagatccagcgcctgctcccagctcacccgcacaaactcatcctgcccgcgcacgccttgtgggctttctggcgaggcgagaaatcccttacgcaccatcggataacgtacgcgggttttgctatgcacctgatcgcgcactgcggtttgcagcgagttggggaaaggggtatcaagcgccccgcgcgaagagatgacgttctcgccatcggtttcgaccagcattggcccccaatgggctgcggtcaggatagttttggtagcagatgaggttggcaatgcgggctcctggtcagcgatagcaggtgtggtgacggcacgttattcagccgttcaatgttatttacaaattgagatgctctctgcggaattttctccggtttcgggcgtcataatcaaccgtcacggtcgctgtggcaaagaataaaaaggattaaggaaataagatgaaaaaacgcgtactcatgattgcggctgtcgttagcggcgcactggccatttctggctgtaccaccaatccctataccggggagcgcgaagcgggtaaatccgggatcggcgcgggcattggttcgttagtcggcgcaggcgttggggcgctctcctcttccaaacatgaccgcggcaaaggcgcgctgatcggcgcagcggccggcgcggcgctgggcggcggtatcggttactatatggacgtgcaggaagcgaagctgcgcgagaaaatgcagggaaccggcgtaagcgtgacgcgaaacggcgacaatatcgtgctgaacatgccgaacaatgtgactttcgacagcagcagcgccaacctgaaacccgcgggcgccaataccctcaccggcgtggcgatggtgctgaaagagtatgagaaaaccgccgttaacgtagtgggttataccgacagcaccggcagccaggatctgaacatgcgcctctctcagcagcgcgcggagagcgtcgccagcgcgcttattacccagggcgtggcggctaatcgcatccgcacaaccggtatgggcccggcaaacccgatcgccagcaacagcacggcggaaggcaaagcgcagaaccgccgcgttgaaattaccctcagcccgctgcagtaatgccctctttgcccggcgactcgccgggcaaaatgcttgatatagcgaattttcgcgctaaggtgtgtgcagatttcagcaaaggaagccaccatggcgaaagcggcgcgagcaaccattagcgatgtggcgaaagccgcaaagaccggcaaaaccagcatttcacgctatctgaacggcgagaagcatctgctttccgacgatctgctggggcgcattgaaaaagccattgccgagctcgactatcgtcccagcctgatggcccgcggcctgaagcatggccgcacccggctgatcggcctgatcatcgccgatatcaccaacccctactccgtcaacgtgctcagcggcattgaagccgcctgtcgcgaaaaaggatttaccctgctggtatgtaataccaacaatgagctggaccaggagctgcactatctcgacctgctgcgcagctatcaggtggaggggatcgtggtcaacgcggtcgggatgcgcgaggacggcctcaaccgcctgcagcagtcggcgctgccgatggtgcttatcgaccgcaaaattccggaattcgcctgcgatgtcgtcggcctcgataatacccaggccgccaccaccgccaccgaacacctggtggaaaagggcttcgaagccctgctgttccttagcgaacccctcggctcggtcaatacccgccgcgagcgcctgagcgcgtttcgccagaccctcctgcgccataccggtattgtcgcggaaaacgccgaagtaccgttgaacgatggcgcgatgctggataacgtcctgcgccacttccactcccaccatcgcggcatgcgcaaggcggtgatttccgccaacggcgcgctgaccctgcaagtggcgcgctcccttaaacgcgttggcctgatttggggcagcgatatcggcctgctgggcttcgatgaactggagtgggccgagctggcgggcgtggggatcaccacgctcaaacagccgacctggcagattggcttcgccgccgtcgagcaggtggtgcgtcggattgaaggcagcaacgacccggtctgcgaacgggtgttttccggcgaactgatcgtcagaggctccacctcccgctaacgatccttcgtgatggcgatcataaattagacatcctggcctttgctttggaaccgataccatctagcgtaataaacaacgcatcagattatcgtcgggagtattgggatggccagaaagattattgtcgttaccgccgcgtacgggaatgaccatgttaaagcgctgggcgggcagtccgccgtcctgccgtttatcgccggctccggcgccgacggcgtagagatccgccgggaactgttcagcgcggatgagctgaaccgcctgccggaactggccgccgatattgagcgccgcggcctgctggtttgctattccgcgccggaagccctgtttaccgcagacggctcgctcaacccgcgcctcgccgactttttgcaggaagcgcaaacccttaacgcattgtggctgaagctctcgctgggccgctttacccaccaaaacgatctggacaccctgcgcgatatcctgcgcgagagcggcatggcgctggtggtggaaaacgatcaaaccgactgcggccagctggcgccgatgcagcgcttcaaggccgcctgtcgggttaaccagctgccgatcaccctcacctttgatatgggcaactggctgtgggttggcgactcgccggaagatgccgcgcgccacctggcgcctgccgtcagctatattcatgtaaaggcggctgagccgcaccattcgcagtttcgcgccgtaccgccggatgaagcgtccgggcgctggctggcgctgctcgacaatctgcccgcagacgccccgcgcgggatcgaatttccgctgactggccatgacctgacggccgtgacccgccgctacgtcaacctgttacgcgaggattaagttatgcaaaaagcgttagatgtcatcacgataggcgaagccatggcgatgtttgtcgccaccgaaaccggcgaactggctgaagtagaacattttatgaagcgcgtggcgggcgcggaactgaacgtcgcgaccgggctggcccgcctcggcttaagcgtcggctgggtaagccgcgtcggcgcggacagctttggccgcttcgtcctcaccgcgctgacgaaagaggggatcgacgcccgcggcgtgagcaccgatggccgctacgctaccggctttcagctgaaatctaaagtcgaaaatggaaccgatcccatcgtggaatattttcgcaaaggctctgccgccagccatctgtcgccggatgattttaacgaatcatacttcgccagcgcccgtcacctgcacttaagcggcgtagccgccgcgctgtcggaaagctcatacgccctgctggaccgcgcggcgcgtaccatgaaagcgcagggaaaaacgatttcgttcgaccccaacctgcggcccacgctgtggaaaagcgaagccgagatggtcgagaagcttaaccgccttgcgtttcaggccgactgggttctgccagggttgaaagaaggcatgattctgaccggccagcaaacgccggaagccattgcggacttttatctcagccacggcgttcgcgcggtcatcataaaaaccggctccgacggcgcctggtataaaaccgccgacggcgaacagggggccgttgcggcgataaaagtggataacgtcgtcgataccgttggcgccggcgatggctttgccgtcggggtgattagcgccctgctggaaggaaaaccgctgccgcaggcggtgaaacgcggaaacaaaatcggctcactggccattcaggtccagggcgatagcgaaggcttacccacgcgtgaggcgctgggcgagtaagcagattcagcacaacgtcaggccgttctgtaccctacatgcagcgcggcgtaacggatcttttctatgatgagcgtcacctcactcacagaggcaaacctatgaatagttcgacgaatgcaacaaaacgctggtggtacatcatgcctatcgtgtttatcacgtatagcctggcatatctcgaccgcgctaacttcagcttcgcttcggcggccggtattactgaagatctggggatcaccaaaggtatctcctccctgctgggggcgctgttcttcctcggctacttcttctttcagatccccggcgcgatttacgccgaacgccgcagcgtacgcaaactcatttttatctgcctgatcctgtggggcgcctgcgcctcgctgaccgggatggtgcacaatattcccgcgctggcggcgattcgctttattctcggcgtcgtcgaggccgcggtcatgccggcgatgctgatttacatcagcaactggtttactaaatctgaacgctctcgcgccaataccttcctgatcctcggcaacccggtgacggtgctgtggatgtcggtggtgtccggttacctgattcaggccttcggctggcgggaaatgtttattatcgaaggcgttccggcggtgatttgggccttctgctggtgggtgctggtaaaagacaaaccttcgcaggtcaactggctggcggaaagcgaaaaagccgcgttgcaggagcagctggagcgtgaacagcagggaatcaaaccggtgcgcaactacggcgaagccttccgctcgcgcaacgttgtcctgctgtgcatgcagtatttcgcctggagcatcggggtttacggtttcgttctgtggctgccgtcaattatccgcagcggcggcgagaatatgggcatggtcgaggtcggctggctctcatccgttccctatctggcggcgaccatcgcgatgatcgtggtctcctgggcctccgataaaatgcagaaccgcaagctgtttgtctggccgctgctgctgattgccgccttcgcctttattggttcctgggccgttggcgccaaccatttctgggtctcttataccctgctggtgattgccggcgcggcgatgtacgccccctacggaccgttcttcgccatcattcctgagatgctgccgcgcaacgtcgccggaggcgccatggccctgattaacagcatgggcgcgctgggttcgttcttcggctcatggtttgtcggttacctgaacggcaccaccggcagccccgcagcctcgtacattttcatgggagtggcgcttttcgtctcggtatggcttactttgattgttaagcctgctaataatcaaaaacttccgctcggcgcacgtcacgcctgaaaccttaacgcaacggagaaccgcatgaagccgtcagtcattctctacaaaacgcttcccgacgacctgcaacagcgtctggaacaacactttaccgtcacccaggtgaaaaacctgcgtccggagaccgtttcacagcacgccgacgcgttcgctgaagcggtaggtctgctgggttccagcgaaaaagtcgataccgcgttactggagaaaatgcccaagcttcgtgcgacctcgaccatctccgtcggctatgacaacttcgacgtcgatgcgctgaatgcgcgtaaagtgctgctgatgcacaccccgacggtactgaccgagaccgtcgccgataccgtgatggcgctggtattgagcaccgcgcgtcgggtggttgaggtggctaaccgcgtgaaggccggcgagtggaccaaaagcatcggtccggactggtttggcaacgatgtgcaccataaaaccctcggtatcgtcgggatggggcgtatcgggatggcgcttgcccagcgcgcccacgcgggctttggtatgccgatcctctacaacgcccgccgccagcaccctcaggcagaggagcgctttaacgcccgctactgcgatctcgataccctgctggaggaagcggattttgtctgtctgatcctgccgctgaccgatgagactcatcatctgttcggcaaagcgcagtttgccaaaatgaagccctcggccatctttattaacgccgggcgcggcccggtggtggatgagaaggcgctgattgccgcactgcaggaaggtgaaattcatgccgccggcctcgacgttttcgaacaagagccgctggcgaaagactccccgctgctgaatatgccaaacgtggtcgccgtgccgcatattggctcggccacgcatgaaacccgctataacatggcggcctgcgcggtggataatctgattgatgccctgaacggcaacgttgagaagaactgcgtgaatccgcaggtgaagtgagaagtgaaaaaagaaaacccgggctaaggtgaagccttgcccgggctgtcagagccgttaacgcgtcgcgttaactgccgcggtccacgcctgattaaaggcctggtgctgggcggccagcggcccaatcagcgtattgtactgactggcctgctgcgaagtcgggaactgaataccgttcgccacgaagctgacctgggtttcttgctgagcgataaaatcacccacctgcaccagctgttgggtaaatacctgcgctgccggaattaacggctgtagcgcattcgccggcgccgtcacgactttgttatagacctggtcgaaaaccggcttgagatcgtcgccctgtttcagcgcgccgtgggcggcatccgcctgtatttttgcgttctccagctgctggctcagtacgcccaaagcgccgtttgcctgacgcagcggctcgcgctgggtaacataatcctgcggtacgcggatcgcgttcacgctatcaaccaccggacgcaaacccgcatccatcgcctggcttacctgctgtgaatagccgtaaatcaccgcgtaatcggaaacgaaaggtccgaactgttttttctgatcggcggtcagcgtcggcagacgttcgccgctacgcattgccgtattttgcaggaagtcgataaacgctttgcgctgatcgccttctttatcaaaacacccactcaggctaaccaccattaacagggccgcaatagccgcaaaccagcgagagcaggactttcctgtcgccatttttttactcctttcagccaaaaaaagcgcaaacagacacacacgtgccagacgctgacaaggatagtccaggtcggccttgcaggataccttttcctgacaatcttcctccctgaaagccggttttttagcgttttagcggccagtcgcgtcggctgttaagttcatcacaattaccgctatcatccggtattcggctgaaacgcttaacaaattgattttgttattattaatctattctctcttctgcacgggtcgcaaagtggacgataatcgcacgcttcccttttcgcctgcattgcctgaaccgccgttcgatgattttattaaatgagcgattaacggctttttgttcgataatcgcacaaacaacatcaacgaccgcgagggagataacaataatctatctctgtcccccgctctgcctgccaggaatgccgcatgaagaaaacaaccatcgatattcaggcttttatcaatgaacatcccttcacgaaataccagtggatgattctggccttatgttttatcaccgtcgcgatggacggattcgataccgcgataatcggctttatcgcctctgacctggtgcaggaatggggcgtcgaaaaatcggcgttaggcccggttatgagcgccgccttagtcgggctcgcggtcggcgcgctgaccgccggaccgctcgccgaccgcgttgggcggaaaaaagttctgattatgtccatcgtggttttcggtggcttcagcctgctgaccgcctttgctaccagccttaaccagctgacgctgctgcgttttcttaccggccttgggctgggcgccgccatgccgaacgccgcgacgctgatgagcgaatacgcccccgagcggcgtagggcgctgatggttaacctgatgttcgtcggctttccgatgggctcctcgctgggcggcttcctctccgcctggatgatcccccattacggctggcaaagcgtgctggtgcttggcggcgtgatgccgctgctgctggcggtagtgctgatctttcttctgccggaatccgcgcgctatatggtggttaaacgccagcctgcccagcgtatcgccgcgatcctgcgccgcatcgcgcctgttcccgagcaggcggaatttgaactacgcgaagcgggccaggtaaaggagaaatcgtccatcggcgtgattttctcaccgcgctacgccgtcggcaccgtcatgctgtgcctgacctactttatgggcctgctgatcttctatttgctgaccagctggctgccgctgctcatccgcgaaaccggcgcgacgatgagccaggcctctattatcaccgcgctgttcccgctgggtggcgggattggcgtgcttatcctcggcgcgctgatggataagttcaacccaaacaaagtggtggccgtgggctggctgctgaccggcatgttcgtttgtctggttggtttctcgacccataacctgctgctgatggggataatggtatttatcgccggcagcattatgaacggcgcgcaatcatcaatgcctgcgctggccgccggtttctatcccacccagggacgcgcgaccggcgtggcctggatgttagggattggtcgctttggcggcattctcggcgcctttagcggcgcgttcctgatgcaggcccagctctctttcgaaacgattttctccttgctggcaatcccggccttcctgtcggccaccgcgctgctggtcaaatataagcttggccaacggcaacctccggcggcccagggtgaagtggagaagctccaaaaggcgtaatataccggccagcgggcgcgcgctggccttttccgcttttcttcttatctgtttacaataatttgcttatcggctctctctattacttttcagcatgttatatcgtccgacgcggcgcgaaagaacctcgggtgataaataattatcagggtaagcattcctggcctttttttccgactattcttaagaggctctacataattcaccctccgccgtatgaaagagaggagttctcaatggaatataaagatcctgcatttgaactgctgagcaaccttgaacaaattatttttaaagatcaggctcaggcggcctcgctgacgcgtaagcccgccgcatgcattgaatttgaccagctacgcaaaggtaccgggctgaaaatagatgattttgccaacgccatgggcgtcagcgtagcaatggtacaagagtgggaatcgagacgcgtaaggccttctcccacagagcttaagctgatgcgcctgatccaggcgaatccgcagctttcaagacagcttattgattcataattttagcgtttatgggtttcggctagcggtcctgccaaaggaccgttttcatgccaacgaaaaaaaagtttgctatcacaacgtgaacatgcgttaatgctcgcaggtttgaagtaaagaccacagagcattcgaatagagcagtccttcaaaggttatccgttgataccccggtagtgaactttccctttatcgctttaaatctgtagtccagaccgtaacgccgcaaggctcatttatttttttaaaggtaattcactatgtccggtaaaatgactggtatcgtaaaatggttcaacgctgacaaaggctttggcttcatcactcctgacgatggttctaaagacgtgttcgtacacttctctgctatccagaacgaaggctacaaatctctggacgaaggtcagaaagtttccttcaccatcgaaagcggcgctaaaggcccggcagctggcaacgtaaccagcctgtaagcttaaaaagctcaaaattattaagtccctgccaaacggcggggattttttatttgcgccttaagtcaccgccatccatcgatggcggttttttgcatttatagcctctcaacgctccagccctcttcccgccatgccaggcaatgggtcagcttcagcgcccgtaaaaaggcttcatcatgcgacaccaccagcatcgcgccgggaaactgtgccagcgctttttcaatcgccagagtggacgccaggtcaagatggttagtgggctcatccaacagcagcagctgcgtagcctcccgtcgccagagcacgcaggccagcgccgcttttaatctttcgcctccgctcagaaccgatagcggtagatggactttgtccgcccccagctgtagctgcgccagctggctgcgcagcacaccttcttctaagggcgtatcaccgagattcaggtgcgccatgatggacaatgacaggtccagctggctcagatgctgatccagatacgccgcgttgaccgataagcggcagcttcctgagagcggcggctgcaggcccagcagcgttttaagcaacgttgttttaccgcagccgttggggccacgcagcgccacgcgcatcggcccatctatacgccagtccagcgctgccatcggtgaatgggtcagccgcagcgcgtccagctccagcacctgctttcccgcagcgacctggctaccgggcagagtaaacatcaccgggttgtcttcctctacccgctcacgcgcctgctctatcgcatcgttgaggatgctgctttgttcacgatgctggcgcttaagggtgccgggacgctcttttgccgcccctttccaggcaacacgctcaaatgaagcgatattgagcgtgtcgatagtgcgcaacgtctgcgccgagcggcgccggcaggcatcgtgctctttttgcatccgcgcccgggttcgtcgccgttcagtaaccgcatgctccagcgcggcgcgagccgcctgctgctccagctcacgctgctgctgataatccgcataatttccgccgtagctgcgcaaagccgcagatgccagctcgaggatgcgcggcatttgggtcagtagctcccgatcgtggctggcgatcaacgcccctccgcgccattgctcaagctgctgatatagccacgcgcggccttgtcggtcgagatggttggtgggttcgtcaagcaggaggaaatccgcgtcggacaggaacgctccgcacagctgcgccttcactctttccccgccgctcagcgaagaggcgagccgtccgggggaaaattctcctaagccagcggcctggaatcctgcattcaggcgctccgggagatcccaaaagccatcaagtcgttcaagatcgtcggctcgcccttcgccccgttcaagacgagccagagcagaaaaaacgaattcgacaccaagccattccgccagcgtcgtatcaggaaacatgacatgctgctgagcaacgtagctcaccgaagccacacgttcgatatggccgctcgacggcgagtccaggcccgccagcaaacgcaataatcgggttttaccgacgccattgcgcccgacaagcccgcagagggtgccttccagcgataaattcagcggaccaaaaagcgtatctcccgtcgctaactgacaggtgacctgatgcaaaagaaaagagggggaccgggcacaatgagccataagcactcctgaatgaaatcaatacctcccctgctcgcaaatagcgcgaagcaaggcgtgaaattcatcagtcgtgtttgttcatttggcgcgtgctctccggtgagacgagggattcgtcgggccataggatagccataccccggtatacatttcaagcctgttttttcgacaggccgtgaatccggaaaaaaagcctcctggtttcaggaggcgaaataaatgatttcatgaaaaaaacagggtgctataagaatgcttaacgccgtaagaatggcggagatcgctctccgccaccgtctcttacgttttaatcccacaggctaagaacgccaccagctcaatattcccctgcctgagctgtaattcacacagcgaatcacgcaccatccaggtaaataataaaatagtgaagcaaatcactattaagctaaacaacagatacttttgcggcattcctcgcctcccgtgttgattttcaacaggtaagaggctactcttatggtgttcatgcataggggagcctcactttgatttatcatcaggtggggcttttctctgtttgtctcccgctgaacgcctgagacaaacagtctcaagcacccgtcagcattctaccgtaaatatctgaccagactacgttggcatattcctaaaataattcccggcaatcaatgaaaataacgaaaatatcaatcagcgaattattaatggttcacttacttatatttttagtataaaaaaacctgcccgcaggcaggttttttattattacccattcacttactgcagcagggaaatatccgctacctgcaggaacagatcgcgcagcttggacagcagcgtcagtcggtttacgcgcacatcctggtcttctgcgttcaccatcacgttctcgaagaactcatccaccggctcgcgcagggacgccagctcaatcagcgcatcctggtaacgcccttcggcgaagtacggctgcagcttatcgcgcagcacgactaaattgcctgccagcttgatttcagccgcttctttcagtacggaggcgtgaacgatatcgttcagcgtcacgtctgatttcgccagaatgttggatacacgcttgttcgccgccgccagggcggaggactcttcgagggtacggaagtgggaaaccgccttcatacgcgcatcgaagtctgccggacgggttggacgacgcgccagtaccgcctgaatcgtgtcgacggtatagccttcatcctgataccaggcgcggaagcgtcccagcatgaagtcgataacatcgtcgaccacgttgccattcgtcagcttgtcgccgtacagacgcaccgcttcttcagtcagcgtttgcagatccagattcaggttcttctcaacgatgatacgcagcacgcccagcgcggcacgacgcagcgcaaacgggtctttatcgcctttcggatgctgaccgataccgaagatacccgccagggtgtccatcttatcggcaatcgccacggcgcaggccaccgggttagacggcaggtcatcgccggcaaaacgcggctgatactgctcgttcagggcaacggcaacgtcttccgcttcgccatcatggcgcgcgtagtgcatccccatcacgccctgcgtgtcggtgaactcgaagaccatgttggtcatcagatcgcacttggagagcaggcccgcgcgggtagcatgattgacgtccgcgccaatctgctcagcgatccagccggccagcgcctgaatacgatcggtcttatcgcgcagcgtacccagctgctgctggaacagcacggtttgcagacgcggaaggttatcttccagacgttttttacggtcggtattgaagaagaactcagcgtccgccagacgcggacgcaccactttttcgttaccggaaataatctgggtcggatctttcgattcgatgttagcgacgaagataaaattcggcagcagcttgcccgcgttgtcgtaaaccgggaagtacttctggtcccctttcatggtgtaaaccagcgcttcggcaggcaccgcaaggaatttttcttcgaacttcgcggtgaggaccaccggccattcaaccagtgaagtcacctcttccagcaggctttcgctcagatcggcgttgccgccaattttacgcgccgcttcttccgcatccgctttgattgtggctttacgctgttcgtaatcggcgatgactttaccgcgctccagcaggatctgcggatactgatcggcattatcgatagtgaactccgcctcacccataaagcggtggccgcgaataacgcgatcggactgcacgcccagaatggtggccgggattactttgtcgcccagcagcagggtcacggtatgaaccggacgcacgaagtggacgtcggacgcgccccagcgcatcagtttcgggatcggcagcttcgccagcgaggtcgcgatcatgttcggcagcagcgcttcggtgctctcgcctttcacgtgggcacgatacagcagccattcgcctttatcggtcgtcagacgttcagcctgatcgacggtgataccgcagccgcgcgcccagccttcggccgctttgctcgggtggccgctggcgtcaaacgcctgggcaatcgccgggccgcgtttttcaacttcacggtctgcctgcgcagccgccagattcgccaccttcagcgccagacggcgcggtgcggcaaaccattcaactttaccgtgcgcgaggccagcgttatccagctctgcggtcacgttcgcagcaaaggattcagccaggctgcgcagtgcttttggtggcagctcttcagtgccgatttccaccaggaaagttttctcagacatggccgcctcttatttattcttgttgcacatcgggaagcccagggcttcacgggaagcatagtaagcttcagccactgctttggtcagggtgcgaatgcgcaggatatagcgctgacgctcggtgacggagatggctttacgcgcgtccagcaggttaaagctatgggcggctttcagaatgcgctcgtaggcaggcagcggcagcgggttttccagcgccagcagctgctgggcttctttctcatactgctcgaagcaggagaacaggaagtccacatcggcatattcgaagttataggtggattgctccacttcgttctgatggaacacgtcgccgtaggtcgttttacccagcgggccatcgctccagaccagatcgtaaacgctgtcgacaccctggatatacatcgccagacgttccagaccgtaggtgatctcgccggtgaccggcttacactccagaccgccaacctgctggaagtaggtgaactgcgtgacttccataccgttcagccacacttcccaacccagaccccaggcgcccagcgtcgggttttcccagttgtcttcgacgaagcgaatgtcgtggatggtcggatccatacccagctctttcagagacccaaggtacagctcctggatattatccggagagggttttatcaccacctggaactgatagtagtgctgtaaacggttcgggttttcaccgtagcgaccatcggtcggacggcgggaaggctgcacgtaggcggtcgccatcggctcgggacccaatgcgcgtaagcaggtcatcgggtgagaggtgcctgcgccgacttccatgtccagtggttgaacaatggtgcagccctggcgagcccagtaatcctgtaaggtcaggatcaggccctggaaggtcctggtatcaaacttttgcatatgatttcgtgctggatacgtgtggatttaaaggaaggagccagtatacccgctggctgcgagatatacagtatgaaacgggattgtttagggaaaattgcggaaataagcgccaccgtgggcgcgtttagcgcatggaaagatgcaaaaactgtccgtccgggtcaaaagaacagataaaacgttcattccgcgcagtcttgcccgaaagctcgtagctcccctgaaactgctcgaaatggctgatgtcaacctggcgcacgcctgtactataacgaacggcggcattatccttgcaaagctgcgccatattgagggtagcctgcggcgttatccgtgctttctgcgccttctgcactggcggagacggcgtcgcgctacagcccgccagcaggcacagcagtagtccagaaaacacatatttcatcaccattttttctcgaccgccttgttagtaaattgttatcgtgcaggttacgttaaataatcggcacattgtgcgaattgggccacacctcgacaagtctatgccgaaaaactcggattattccactgcgataccagcggataagggcggtcagaccctttctgagaaggagaaacagaggcactgatgcaggaaaaaattcactggattactcatttgcgcggcattgcctgcatgatggtggtcatgattcatagtaccacctggtatatcacgcatccgcacaccatcagcctgctggagtgggatctcgccaatatcctcaactctgcatctcgcgtcagcgtccccctgtttttcatgatttcaggctatctgtttttcggcgagcgcagcgcccagccccgccattttctgcgtatcgcgctgtgcattctcttttatagcgcgctgtcgctgctctatatcaccttgtttacccacatcaacgttgaactgtcgctgaaaaatttgctgcagaaaccggtgttctaccatctgtggttcttcttcgctatcgtagtcatttacctgctttctccgctggtgcaggttaaacaggtgagcggcaggatgctgctggcgctgatgctggtgctgggtattctggcaaaccccaatatggtcccggtgaaagccgcaggcgttgaatggctgccgctcaatctctatatcaacggcgatacgttctactacgtgatgtacggcgtattagggcgggcaatcggcacgctggataccgataaaaaatggctgactgcgctctgcgctgggctattcatcacgggagtatgggtaatatcacgcggcacgctgcacgaactgcgctggcgcggcgattttggtgatacctggtatttatattgcggccccgcggtttttgtctgcgcgctcgccctgctgacgctggtaaaaaatacgctcaatacgcgtcagctgccgtttattgcgcttattgcgcgccattcgttaggcatttacggatttcatgcgctgattattcacgcgctgcgcgccagcggactggagctgacccgctggccaatgttggatattgcctggatattcagcgctgcgctgctgggtagcctggcgctatcaatgttggtacagcgaattgacagccgccgactggtgagctgaaaaacggcgcctgcggttcaacgccggcgccgtcgtttactcagcgggctcttccgtgactgcgccgacctctcttcgctgtccgctgacagcttattccactgagttattgcgagctttatccgtgactttagcgggataaggcgttgccgacgcgccgtacatacagacaaaccacgccatcacgtaaatacttttttcacgccacggagccgggacaaaccaggcgccgaccagcagcaatcccaccgacagcagcaccaccagccggcacagagagataaaatcgccgtctcgctgtgcttcttgcgccgttcgctgatgcgtgagcacagcaaacatccccatgaccagaacgcccagaaaatagcctttaccgctaaataatgggcaggttcgccagattcccaccagataaaccagtgcgccaatagacatcaacagccttgcaataagattgtttttcatggtgcctccctggcataagacaggccccattgtggactggcagaacgcgtttatccgtacttttcgtccctgaaacgataaattcagaatatataaatacactcgataactacatgaatttaaaattattcatgagatgaattcgccccatcgacaggggcgaaagaatcaggacatcagcggtaaaagctgctgataaatctggcggaaggtttcccggcgaggggcgtaacgagcaaagcgctcggcatcaggacgatgagcctgttccagcgggagctgaggaagtagatcggaaaacgcgatattttgatgcaacgccagctgggccagccgcgccgcgccaagcgccgggccgacgtcaccgccggtgcggaaatccagctgctggccgctaatatccgccagcatttgccgccagtaggcgctgcgcgcgccgccgccgataagcgtgacgctctcgggcttcacgccgcaggcgtgaaccacatccataccgtccgccagcgcataaccgacgccctccagcaccgcccgcgccagttccgccggaccatgttgatgagtcaggccgaaaaagacgcctttggcctgcggattattgtgcggcgtacgttcaccggagagatagggcaggaaccagaccggatcggcatcgtcgttcgccgcttccgccgccgcaatcagcgccggaaccgtgccgaggccggttaatgtcgccgcccaatcgaggcaggaagccgcgctcagcatgaccgacatcagatgccagcgcccgggtagcgcgtggcagaaactgtgtacggcgctttccggcttgctaagaaagccgtcgctgacggcaaagtagacgccggaggtccccagcgacagcatcgcctggcccgcatccgccatgccaacacccaccgcccccgccgcgttgtcgccgccgccggccaccaccagcgcttccggcatattccacgactgcgcgacggccgggcgcagcgaacccgtcacttcacatccttcgaacagcgccggcatgttatcgcggctcagaccgcaggcggcgagcatctcatcgctccagtcgcggcgcgccacgtccatccacatcgttccggcggcatcggacatatcgctggcaaactcaccggtcatgcgcaaacgtaaataatcttttggcagcaggactttatcgacctgtttgaagatctcaggctcgtgacgttgtacccacagcagcttcggcgcggtaaatcccggcatcatcaggttgccggttatctgccgcgaacggctgacgttctcttccagcagcgcgcactcttcaccgcagcggccatcattccataaaatcgccgggcgcaggacgcgctgttgcttatccagcagcgtcgcgccgtgcatctggcccgcaatacctaacgctttgacttcgcgcagcgagtgctgcgcgcccagcgctttcatcgcgcggtccgtcgccagccaccagtgctcaggatcttgttcagaccataaagggtgcggacgcgacacgttgagcttttcggtatgcgaagccacgacctcgccttgctcgttgagcagaatagccttgacgcccgaggtgcccagatcaatcccgatatacatacagcctctccttactgacgcgccacggctaagcgtggcgcgaataaagcatcggttatcgccaatgcccgggctcgccgggcatcatcgccctcattagcgatcaaagaggtaacggttaaccacgttttccagcagttcctgatggccgctctggtgctccggcgccaggttatgctgagtggcatactgggcaatgtccgccaggttcatctggcctttcaggatctgctgacccagctcgccgttccagccggcatagcgcctggcgacgcgtttatccagctcgccgtcttcaatcatacgagcagcgacttttaacgccagcgccatggtgtccatcgcgccaatgtggccgtagaacaggtcgtatttgtcggtgctctgacgacgcactttagcatcaaagttcaggccgccggtggtgaagccgcccgctttcaggatttcgtacatcaccagcgcattctcttcaacgctgttcgggaactggtcggtatcccagcccagctgcgggtcgccgcggttagcatcaacggaaccaaacagacccagagcaatggcggtcgcaatttcgtggtggaaagtgtggccggccagcgtcgcgtggttcgcttcgatgttcagtttgatctctttttccaggccgaactgtttcaggaagccatagacggtagacgcgtcgtaatcgtactgatgcttggttggctcctgcggtttaggttcaatcagcagcgtgccctggaaaccgattttatgtttatgctccacgaccagctgcataaagcggccaatctgctcgcgctcctggcgcaggtcggtattgagcagagtttcatagccttcgcggccgccccacaggacgtagttttccccgcccagtttgtgggtcgcatccatcgcggtcaccacctgagtggccgcccagctgaacacttccggatccgggttggttgccgcaccggcaccgtaacgcgggttcgtaaagcagtttgccgtaccccacagcagcttgacgccgctctgctgctgtttttccgccagcacatccaccatctgcgcgaagttgttggcatactctttcaacgacgccccttccggagaaacgtcaacgtcgtggaagcagtaatacggtacgtttagtttttggaaaaactcaaacgcgacatcggctttgcgtttcgccatttccagcgcttcgcccggctgctgccacgggcggttaaaggagcccacgccgaacatatcagcgccgttccagcagaaggtgtgccagtagcaggccgcaaagcgcaggtgctcttccatccgtttgcccaggaccagctcatccggattgtaatgacggaaagccagtgggttagcggatttcgggccttcataacgaacgcgatcgagctgatcaaaataggtctgcataatgaactccatattcagggatgcggcgagtaataagtcataagccaatatagaattctctttttagtttcctcaattacgttatttcacactgtgattgagagaatccacaaacgtgcgccaggtcgcaaaaacaatagaacaacgccctcacttcgctgcttacgccacgagagatcaatgaaatacgatgagaactaattattaaagtacgatcgcggtcataaattaacaaataaacaaaatttcataacggcaaaataagcatagataattgccagcgctcctttccgcgttaaaaatctgctacgtatcaggccatttatttttatcgttcgtcttatcctgcactttacaaaaaaggtgttattattatgaagataaagaacctttgcctaacgctctgtgcttcactcctcctcaccagcctgtcgggcattgcgaaagaagtcaaaattggcatggcgattgacgacctgcgccttgagcgctggcaaaaagatcgcgatatttttgtcaataaagctgaatcattaggtgcaaaagtattcgtccagtcagccaatggcaacgaagaaacgcaaatgtcgcaaatcgaaaatatgattaatcgcggcgtcgacgttctggttattattccctataacggtcaggtgctgagtaatgtgataaaagaggctaaacaggagggaattaaagttctcgcctacgatcgtctcatcaataacgccgatattgatttctatatttcttttaataatgagaaagttggcgaaatgcaggcgcaaagcctggtcaataaagtgcctcagggcaactatttcttaatgggcggctcgccggtagacaataacgccaagcttttccgcgccggccaaatgaaagttcttaagccctatattgatgaaggaaaaattaaagtcgtcggcgatcagtgggtcgacggatggctaccagaaaatgcgttgaagattatggaaaacgccctgaccgccaacaataacaaaattgatgcggtcgtcgcctctaacgatgccaccgccggcggcgccattcaggcgttaagcgcccaggggctcgcaggcaaagtggcgatttccgggcaggatgccgacctcgccggcgtgaagcgcattatcgctggcactcagacgatgaccgtttacaaaccgatcgctgaccttgccaccaccgcagcagagatcgccgtcgaactgggcaacgataagcagccgaaggccgacgccacgctcaacaacggcctcaaagatgtgccttcccggctgctgacgcccattgaggtcaataaagacaacattgaccagacggtaatcaaagacggtttccacaaaaaaagcgagctgtaatctctgacgccctctcccgggggcgttgccccatccagccggatatcgcttatgtggagtctctatgtcctggttactcgaaatgaaaaacattactaaaaccttcggtacggtgaaggcgattgataatgtcagtctgcggcttaacgccggagaagtggtctcgctgtgcggcgaaaacggctccggtaaatccacgctcatgaaggtcctttgcggaatatatccgcacggtagctatgagggagagattattttttccggggaaacgttgcggccgggccatatacgcgataccgagcgcaaagggattgccatcattcatcaggagctggcgctggtaaaacatctgaccgttctggagaatatttttctcggcgcggagatctcccgccacggtctgctggattacgaaaccatgaccttacgctgcgaaaagctgctggcccaggtcaatttagccatatcacccgatacccgcgtcggcgatttgggccttggccagcagcagctggtcgaaatagcaaaagcgctgaataaacaggtacggttgttaattctcgacgaacccaccgcctcgttaacggagcaggagacggcaattctgctgaatattattcgcgatctgcaaaatcacggtattgcctgtatttacatttcccacaagctcaatgaagtcaaagccatctccgacaccatctgcgtgatccgcgatgggcagcatatcggtacccgtaacgctgacggcatgaacgaagatgacattatcaccatgatggtcggccgcgagcttaccgccctctatccgagcgaagcccacagctgcggcgaggaaatcctgcgggtggaaaacctgacggcctggcacccggtgaatcgccatattaagcgggtcaatgacgtctccttttcgctgcggcgcggtgaaatactagggatcgccgggctggtcggcgcgggccgtaccgaagcggtccagtgcctgttcggcgtctggccgggccgctggcagggaaaaatctttattgatggccagcaggtgacgattcacagctgccagcaggctattgcgcagggcatcgccatggtaccggaagacagaaagaaagacggtattgtgccggtcatggcggtgggtaaaaacatcaccctcgccgcgttaaaccagtttaccggtccgctgagcagccttgacgatgccggagagcagcactgtattcagcaatccatccagcgtttgaagatcaaaacctcatcgccggagctggcgatcggtcgcctgagcggcggcaatcagcaaaaggcgatcctcgcccgctgcctgctgctgaacccgcgcattctgatactcgatgagcccacccgcggcatcgacatcggcgccaagtacgaaatctacaagctgattaatcagctggtgcagcaggggatcgccgtcattgtcatttcatccgaactacccgaagtgctggggctaagcgaccgggtgctggtgatgcatgaaggtaaattgaaggctaatctgatcaaccggggtctgacccaggaacaggtgatggaagccgcactgaggagcgaacgccatgtcgaagaacacatcgtctgaaatgaaactcaccccacctgccgctggcgcgctatcggggctgaaggggatgaacctccaggtattcgtgatgatcgccgctatcgtggccattatgttgtttttcacctggaccaccgaaggcgcttatctgagcgcgcgtaatatctccaacctgctgcgccagaccgccattaccggcattctcgcggtcggcatggtgtttgtgattatttccgccgagatcgatctctccgtcggctcaatgatggggctgctcggcggcgcagcggcaatatttgacgtctggctgggctggccgctaccgctgaccattgtggtcaccctggcgcttggcctgctgctgggggcctggaacggttggtgggttgcctatcgtaaagtcccctcgtttatcgtgacgctcgccggcatgctggcatttcgcggtattttgataggcattaccaacgggaccaccgtctctcccaccagcccggcaatgtcgcaaatcggccagagctatctgcctgatggcgttggctttggtatcggcgtggcgggcatggcggcctttatcatctggcagtggcgcggccgtatgcgacgtcaggctctcggcctctccacgcccgcctccgcttcagccgttggccgccagacgattaccgccgttattgtactgggcgccatctggctgttaaacgactatcgcggcgtcccgacgccggtactgattctcgccgcgctgctgctggcgggcatgtttatggccacccgtaccgcgtttgggcgccgcatctacgccatcggcggcaacctggaggccgcgcgtctatccggcatcagcgtggaacgcaccaagctggcggtgttcgccattaatggcctgatggtggcgattgccgggttgattctcagctcgcgtcttggcgccggttccccttccgccggcaacatcgccgaactggacgccatcgccgcctgcgtgatcggcggtaccagcctcgccggcggcgtcggcagcgtcgcgggcgcggtcatgggcgcttttatcatgtccgcgctggacaacggcatgagcatgatggacgtcgccaccttctggcagtacatcgttaaaggggtcattttattgctcgcggtatggatggattccgccacgaaacgccgaagctgagggctgtgaaaaaaaatgcccgaattatttgcgctaccgccaaacttaggcacaagtagcttgaaaaaatccgggcattggccggtattgtatggcctgcaagagagaccaggaacaacactatgtttgaaaagcgtcaccgtattacgctgttattcaatgccaacaaagcctacgatcgccaggtcgttgagggcgtcggcgaatatttacaagcatcgcaactggaatgggatatcttcattgaggaagattttcgggcacgaattgaaaacatcaaagagtggttaggcgacggcgttattgccgattacgacgacccggaaattgaaaacctgctgatcgacgtgaatgttccgattgtcggcgtcggcggctccttccaccgcccggagtgctatccgccggttcactatatcgccaccgacaacgccgcgctggttgagagcgccttcctgcatctgaaggaaaaaggcattaaccgcttcgccttttacggcctgcccgcttccagctgtaaaggctgggccgccgagcgcgaacacgcgttttgccagctggtcgccagagagaaatatcgcggcgtggtctatcagggtctcgagacggcgccggaaaactggcagcatgcgcaaaaccgcctcgccgactggctgcaaaccctgccgccgcaaaccggcatcatcgccgttaccgatgcccgcgcgcgccacgtattacaggcctgcgagcggctgcatatccccgtcccggaaaagctgtgcgttatcggcatagataacgaagagcttacccgctacctgtcgcgcgtggcgctctcctccgttgcgcagggcacccgtcagatgggctaccaggcggcaaagctgctgcatcgcctgctggagaatgaagagctgccgcttcagcgtcagcttatcccgccgatgcgcgtgatagaacgccgctccaccgactaccgttcgctcaccgatccttcggtcattcaggcgatgcactatatccgtaaccacgcctgtaaagggattaaagttgagcaggtgctggacgccgtggggatttcccgctcgaatctggaaaagcgcttcaaagaggaagtcggcgaaaccattcatacggtgatccacagcgagaagctggaaaaagcgcgcagtctgctggtatcaaccaccctatcgattaacgaaatctcccagatgtgcggctatccgtcgctgcagtatttctattcggtgtttaagaaagagtacgacgtgacgccgaaggagtaccgcgaccggcacagcgaagtcatgatgtagcgcgcaaagaaaaatgcccgggcttacgcaccgggcatcaatgatgacatgtaagagcaattacatgtgcgcggctatcaaccgctggttatcctgatacatcgcgaagagatagttgttatagctcgaccctttggtcgaatagcccttcagcttatgaatcatcgtgctggcggtcacttcctgatcggctttacgcagctgcgcacgcgatttacggaacgacgagtaggccggatgcgtattcagatttctgacataggcctgaacggactcttccaccgaatcaaactgggagtagcccttcatcgcaccgcggcagtttccaccgccacacttcataccaaataaattgttgttcacccgcgccagctttgacgttccccagccgctttccgccgcagccatagtagcgaccatgctattcgggataatgtcgacgcgctcaagcagcgagttccatggaatatggcgagtattgccggaccacttcactttatagcgagaggcgatctctttcagccgcgtacgctcgctcggcgaccagcgcgcatcgtactgcttggaaacaagccagttacgatcggcggtaatcacctgattctgtttcgtaatgtaaggcattaccgtccggagaaacgcttttttccttggtgtcccggaagggtattttcgcaaatcaggaagtgaactgctctttacactattgcgagaatactcttgtttactgcttaccttgcttactttaacggtgcttttcttcttaactattggggctttatgactcgttgttgctgtgtgtgttgttgccagcacactacctgaaaatatgcaggtaagtaacatgagtatcgcggccccatatcgtcgaatgggagtcgatatcattaggtctcctggtcggatgcaatcattccaacgccttgtttttcacaaaaaatcgatagttgaatcgcgaatagtatcaaaaatacccagatgacgcacccacagaaatagtccaattccgaaaagctgtcatctgaaatcggtttccgccccatgacaacagtacaaaaatgcgacagccctcgcattttttgcttgttttttgaacgcgatcactcaccctttttcatcctccctggaaaagcgccggtgggatgagttcattagacagccagacgcgcaaactgaacaaaaaaccgcacacaggactccggaatgaaactcgctgcgcttgcgtcgctgctgttgcctgggatggccttcgccgcctggactaccgcagatttccccgcctttaccgaagaaggcaccggcagatttatcagtcaaaacgaggtagcaaagggtacgcgccctctgcggattaattttgaccaacagtgctggcagcctgccggcgcgatcaagctcaaccagatgctgtctatggaaccttgccgcgatccggcgccgcagtggcgcgtattccgcgatggccgctataccctggaagtcgatacccgttcaggtacgccaaccatgatggtctctctggaggagaaacagaccgccgccgccgcgccgcagatgaagcagtgtccgaaatgggatggcaagccgcttaccattgacgtcagcaaatccttcgccgaaggcagtaaagttcgcgatttctatagcggtaatatcgcgaccgtcagcagcggtaaagttaccctccagccggcgtttaacagcaatggtctgctgctgcttgaacgcgcggaaacggaagccgccgcgccgttcaactggcataacgccaccgtctatttcgtgctgaccgatcgctttgtcaacggcaacccggccaacgacaatagctatggccgccacaaagacggcatgcaggaaattggcaccttccacggcggcgacctgcagggcctgaccagcaaactggattacatccagcagctcggcgttaacgcgctctggatcagttcgccgctggaacaaatccacggctgggtcggcggcggtacgaaaggcgatttcccgcactacgcctatcacggctattacacccaggactggacgaagctggatgccaatatgggaacggaagacgatctgcgccgcctcgtcgatgaggcccacaagcgcgggatccgcattctgttcgacgtggtgatgaaccataccggctacgcgaccctggccgatatgcaggagtttcagtttggctcgctgtacatccagggcgatgagctgaaaaagaccctcggagagcgctggaccgactggaagccccgcgcgggacaaagctggcacagctttaacgactacattaacttcagcgacaaagccggttgggaaaaatggtggggtaaaaagtggatccgcaccgatattggcgattacgacaaccccggatttgatgacctgacgatgtcgctggccttcctgccggatctgaaaaccgaatccacggcgccatccggcctgccaaacttctatcgccataagccggataccgcggccaaagcgatccccggctatacgccgcgcgattatctgacccactggctgagccaatgggtgcgcgactacggcatcgacggcttccgcgtcgataccgccaagcacgtcgagcaggccgcctggctgcagttaaaaacccaggccactgaagcgctggcggaatggaaaaaagccaatccggataaagcgctggataacgcgccgttctggatgaccggcgaggcctggggccacggcgtgatgcagagcgactactatcgccacggttttgacgcaatgctgaattttgattatcaggatcaggcggcgaaagcgacaagctgcctggcgaatatcgacctgacctggcaacatatggcagagaagcttcaggatttcaatgtgttaagctatctctcctcgcacgataccagcctgttccgcgaaggcggcagcacggcggcggaattgctgctgctcgcgcctggcgcagtgcagatcttctacggcgatgaatcttcgcgaccgttcggcccgaccggctccgatccgcttcaggggacgcgctcagatatgaactggcaggacgtcagcggcaaagccgcgcgcagcgtgacccactgggagaaactgggccagttccgcgcccgtcatccggcgattggcatgggtaaacaaaccaccctatcgatggcgaaaggctacggctttattcgcgagaccggcgatgacaaagtgatggtggtatgggcaggccagcagtagccttctgacccaaggctcccctgacactcgggggagccgcttcagaataaaaatccaaaatatcttaatttagcagcataaaaacaaaatatctcactgatacctcgatttgcaccctgtctgcgctggcgttatggttacccactttcctggaataccgacagactaatcgcgatgacattttcactttttggcgacaaatttacccgtcattcgggcatcacccgcttgatggaagacctcaatgacggcctgcgtaccccgggcgccatcatgctgggcggcggcaatcccgcgcagattccggaaatgaatgattacttccatagcctgctggccgacatgctgaacagcggcaaagcccttgatgcgctttgtaattatgacggtccgcagggtaaaagcgagctgctggccctgctggcgcagatgctgcgtgatgaactgggttgggagatcgaaccacagaatattgcactgacaaacggcagtcagagcgcgtttttctacttgtttaacctcttcgcaggccgtcgagcggatggaaccacccgtaaagtgctgtttccgttgacgcccgagtacatcggctacgccgatgccggcctcgaagaagatctgtttgtcgccacccgcccgaacattgaactgctgccggaaggccagtttaaataccacgtggatttcgaacatttgcaggtcacggacgagacgggaatgatctgcgtttcccgccccaccaacccaacgggcaacgtgatcaccgacgatgagctgatcaagctggatgcgctggccaaccagcacggcatcccgttggtgattgataacgcctacggcgttccgttcccgggaattattttcagcgacgccaggccgctgtggaatccgaatatcgtgctgtgcatgagcctctccaagctgggtctgccgggtagccgctgcgggattatcatcgctaacgaaaaaatcatcaccgccatcagcaatatgaacggcattatcagcctcgcccccggcggaatggggccggccatgatgtgcgagatgattaaacgcaacgatcttctgcgcctgtcggaaacggtgataaagccgttctactaccagcgcgttcaggagactatcgccattattcgccgctatttgccggaagatcgctgcctgattcataaaccggaaggcgcgatttttctctggctatggtttaaggatctgccgatttctaccgagctgctgtaccagcgcctgaaaaagcgcggcgttctgatggtgccgggcgactatttcttcccgggcctggataaaccgtggccgcacacgcatcagtgcatgcgcatgaactatgtgccggacccggagaagattgaagcaggcgtgaagattctcgccgaagaagttgaacgcgcatggggtgaacaggacgcgtaaacgagcgccagaatcctgaataatccagatatattcccggctcgcgctgcgctcagccgggctacaggcttccagcgttctgcggacaggcagcccggacaaggcgcgccagcgccgcctccgggaacacgccgtaagaaggcatcatcgctacatcgccagcgccatccgctggcgacgttcagcggctattctctccagctccatcggttccatgcagcgcagcgcctgcgtcgggcatgccgccacgcaggccgggccttcttcccgatggctgcacaaatcgcacttcagcgcctgtacgccctcctccacccgcatcaccgtcatcgcgccataggggcacgccaccatgcagcttttgcagccgatgcagcggcgctgatccacgcgccagaccgaattttcccggcggatagcgccctcggggcagacgttggcgcagggcgcatcttcacactggcggcaaagcgtcgccgtcgagagttcgtcatttttcaccacgcggatccgcggcgcaaagcgcatggcggaaacgccagaacagtcctggtcccgctgatgggataccacgcaggcgacttcacaggtacgacagccgatgcacttttgcgcatccgcgataataaaccggttcatccttgctccactggggataaaaacgcagagtgccagaaaaaaccgcttccgcgccttgatcctgaatggagtcagcggcgttttctctcagatgcccgggacaatttggtcatctgccttacccttcccgcacggaaaagcccagttcgcgggaaatcgcctctgccgtatcgcgcagcggcttgagtaaattcttctctcctacctgcttgaggcgcgatgttgataaggagatagaaatggcataaggcacgcgtccatgaatatcgaaaaccgggaccgccaggcaggacacgcccaactcgttctcttccctgtccatcgccatattacgctcgcggatctgcgccagctcatcatgcatcgcaggtaagccggtaatggtattccgggtcagcggctgaataatatcctggtgtgaattccagtagctctcaacgtagtcaggatggccaaacgccatataaatcttgcccattgccgagcagtacagcggcatatgctggccaatataggcgcgcgtacgcagcatgccggtggtcggctccagcttataaatcaggatagcgtggtcatcttcacggctggagaagttcaccgtctcgccggtggccaggttgagcgcctcaagatgcggcgccgcgacgtggatgatgttgagcgacgacaaagccttttggccaacggcgataaactttgtcgtcagacgatagctccccgccgccggggctggcgtcacgtagccgcaggattgcagcccctgcaataagcgatgaacggtgcttttgttcaggcccgccagttccgacagatgcgccagcgggcatccgtttgggtaattactcaggatctcaatcagcatcaacccacgaaaaaggctctggcttccggcaggcctctccttgtcttgcgttacatcgctctcttttgtgcccatcgtttccgctccccgtttttgtcgcgttcagatggtagcgcaaagtgtgtttcagttcacgatctgaaccgaaaaaacacaactttatgatttttatgatttttaaaaataacgctgcccgttgatctgataaaaattgatcgctatatttgaaatcagatttcgcatagtgaaatttagagataaaaaagcgatcaaatctgaccaggaaaacaggaatgaaagtaacgtttgagcagttaaaagaggcattcaatcgagtactactggcacggggtatcaccgcagaaaccgccgatgcctgcgcagaaatgtttgcccgcaccaccgaatccggcgtctattctcacggcgtgaaccgctttcctcgcttcatccagcagctggacaacggcgacatcatccccgaggctaaaccgcagcgggtaaccagcctcggcgccatcgagcagtgggatgcccagcgctccatcggcaacctgacggcgaaaaagatgatggaccgggccatcgaactggcttccgatcacggtatcggcctggtggcgttacgtaacgccaaccactggatgcgcggcggcagctatggctggcaggcggcggaaaaaggctacatcggcatctgctggaccaactccatcgccgttatgccgccatggggcgctaaggagtgccgtatcggcaccaatccgctgatcgtcgccattccgtcaacgccgatcaccatggtggatatgtcgatgtcgatgttctcctacggcatgctggaagttaaccgccttgccggccgcgagctgcccgtggacggcggattcgacgatgaaggtcatttgaccaaagaaccgggggttatcgagaaaaaccgccgtattttgccgatgggctactggaaaggttccggcctgtcgattgtgctggatatgattgccaccctgctttccaacggctcttccgttgccgaagtgactcaggaaaacagcgatgaatatggcgtttcgcagatcttcatcgccatagaagtggataagctgatcgatggcgcaacccgcgacgccaaactgcagcggattatggatttcatcaccaccgccgaacgcgccgatgaaaatgtggcggtccgcctgcccggccatgaatttacccgactgctggatgaaaaccgccgcaacggtattaccgtcgatgacagcgtatgggccaaaattcaggcgctgtaaggagctcacccatgatttttggccatattgctcaaccgaatccgtgtcgtctgcccgcggccattgaacaggcgcttgatttcctgcgcacgacggattttcacgcgctggaacccggcgtcgtggaaatcgacggcaagaacatcttcgcgcagattattgacttaaccacccgcgatgccgctgacaatcgtccggaggttcaccgtcgctatctggatatccagtttctggcgtggggtgaagaaaaaatcggtatcgccattgataccggcaataatcaaatcagcgaatcgttgttagaacagctcgatattattttctatcacgacagcgaacatgaatcgttctttgaaatgacgccaggcaactatgcgatatttttcccgcaagatgtgcatcgtcctggatgtaataaaactgtagccaccccgatccgcaaaatagtcgttaaggtcgctatttcagttttataaaaaggagcacaaaatgaattcgaataataccggttacattatcggtgcgtacccctgtgcaccctcatttcaccaaaagagtgaagaggaagagacggaattctggcggcagctctccgacaccccggatattcgcgggctggagcaaccctgccttgaacatcttcatccgctcggcgacgagtggttattgcgccataccccgggacactggcagattgtcgttaccgccatcatggaaaccatgcgccgccgcggtgaaaacggcggctttgggctggcatccagcgacgaagagcagcgcaaagcctgcgtggagtactatcgtcacctgcagcagaagatcgctaaaatcaatggtaagaccgccggaaaggtcattgcccttgagcttcacgccgccccgctggcgggcaatgccaacgtggctcaggctaccgacgcctttgctcgttcattaaaagagattacccgctgggactggtcctgcgagctggtgctggagcactgcgacgcgatgaccggcaccgcgccgcgcaaaggatttttgccgttagaaaacgtgctggaagccattgccgactacgacatcagcatctgtatcaactgggcgcgctctgccattgaagggcggaataccgttctaccgctcacccatacgcagcaggcaaaacgggcagggaagctcggcgcgctgatgttttccggcacgacgcaaaccggcgagtacggcgaatggcaggatttacacgcgccgttcgcgcctttctgcccgcagagcctgatgaccaccgaccacgcccgtgaattatttgcctgcgcaggagccgatcccctgcaattctcaggtatcaaattactggaaatcactgccagcgcaaacgttgaccatcgcatcgcgatattacgcgacggcatctcagcgctaaaacaagcacaataataataaccaccttcatcgccagaatattttttaatattacgagactataaagatgaatataacctctaactctacacccaaaaatataccgcgccagcgctggttaagaattattcccccaatactgatcacctgtattatttcttatatggaccgggtcaatattgcctttgccatgcccggcggcatggacgccgacttaggtatttccgccaccatggcggggctggcgggcggtattttctttatcggttatctatttttacaggttcccggcgggaaaattgccgttcacggcagcggtaagaaatttatcggctggtcgctggtcgcctgggcggttatctccgtgctgacggggttaattaccaatcagtaccagctgctggccctgcgcttcttactaggcgtggcggaaggcggcatgctgccggtcgttctcaccatgatcagtaactggttccctgatgcggaacgcggtcgcgccaacgcgattgtcattatgttcgtgccgattgccgggattatcaccgccccgctctcaggctggattatcacggttctcgactggcgctggctgtttattatcgaaggtttgctctcgctggttgttttggttctgtgggcctacaccatctatgaccgtccgcaggaagcgcgctggatctctaaagcagagcagaactatctggtcgagacgctggccgcagagcaacgggccattgccggcaccgaagtgaaaaacgcctctctgagcgccgttctctccgacaaaaccatgtggcagcttatcgccctgaacttcttctaccagaccggcatttacggctacaccctgtggctgcccaccattctgaaagaattaacccacagcagcatggggcaggtcgggatgctcgccattctgccgtacgtcggcgccattgccgggatgttcctgttctcttctctttcagaccgaaccggtaaacgcaagctgttcgtctgcctgccgctgattggcttcgctctgtgcatgttcctgtcggtggcgctgaaaaatcaaatatggctctcctatgccgcgctggtcggctgcggattcttcctgcaatcggcggctggcgtgttctggaccatcccggcacgtctgttcagcgctgaaatggcgggcggcgcgcgcggggttatcaacgcgcttggcaacctcggcggattttgtggtccttatgcggtcggggttctgatcacgctgtacagcaaagacgccggcgtttattgcctggcgatctccctggcgctggccgcgctgatggcgctgctgctgccggcgaaatgcgatgccggtgctgcgccggtaaagacgataaacccacataaacgcactgcgtaaaatcgagcccggcggcgctgcgcctgccgggcctgcgaaatatgccgggtcctcccggcaagaatgagatgcgaaagatgagcaagaaacaggccttctggctgggtattgattgtggcggcacgtatctgaaagccggtttatatgatgccgaaggtcatgaacatggcattgtgcggcaagcgctacagacgatgtcgcccctgccgggttacgccgaacgcgacatgcatcagctctggcaacactgcgcggcaaccattgccgaactattacaacgggcaggggtatccggtgaacagattaaaggcgtgggcatctccgctcagggtaagggtctctttctcctcgataagcaggatcggccgctgggtaacgccatcctctcgtccgatcgtcgggcgctgaatatcgttcagcgctggcagcgggaccgtattcccgaacggctctatcccgttacccgccagacgctatggaccgggcatccggcttctctgctgcgctgggtcaaagagaatgacccccagcgctacgcgcaaattggctgcgtgatgatggggcatgactatctgcgctggtgcctaaccggcgtgaaaggctgcgaggagagcaacatctccgagtccaacctctacaacatgtccacgggccagtacgacccgtgtctgacccaatggctggggatcggcgaagtggatagcgcgctgccccccgttgtagggtcagccgaaatatgcggggagatcaccgctcaggcagccgctttaaccggtctggcggcgggtactcccgtcgttggcggcctgtttgacgtggtctccaccgccctttgcgccgggattgaggatgagtcgaccctcaatgcggtgatggggacctgggccgtcaccagcggtatcgctcacggtctgcgcgaacatgaggctcacccttacgtctatggccgctacgtcaatgacggccagtatatcgttcacgaagccagcccgacctcatccggcaacctcgaatggtttaccgcccagtggggcgatctctcgtttgatgagatcaatcaggccgtagccagtttgccgaaagccgggagcgagctgttttttctgccgtttctctacggcagcaacgccgggctggagatgacctgcggcttttacggcatgcaggcgctgcatacccgcgcgcacctgctgcaggcggtttatgaaggcgtggtattcagccatatgacccatctcaaccgtatgcgcgaacgctttacaagcgttcaggccctgcgcgtcaccggcggcccggcgcactccgacgtctggatgcaaatgctggcggacgtcagcggcttacgcgttgaactgccgcaggtggaagagaccggctgctttggcgccgccctcgcggcgcgcgtcggcaccggcgtataccgcagctttagcgaagcccggcgcgcccggcagcacccggtacgcacgctgctgcccgatatgaccgcccacgcgcgctatcagcgcaaataccgccactaccaggatttgattgaagcactacagggctatcacgcccgtattaaggagcacgcattatgagccgaccattactgcagctggcgctcgaccacaccagccttcaggctgcgcagcgcgatgtcgccctgctacaggatcacgttgatatcgtggaggcggggaccatcctctgtttgaccgaggggcttaacgcagttacagccctgcgcgcccagtgtccgcagaagatcatcgtcgccgactggaaagtcgccgacgccggtgaaaccctggcgcagcaggcctttggcgctggcgccaactggatgaccatcatctgcgccgcgccgctcgccacggtcgagaaaagccacgccgtggcccaggcctgcggcggtgaaattcagatggagctgttcggcaactggacgctggatgacgcccgcgcctggtaccgtaccggcgtccatcaggcaatttaccatcgcgggcgcgatgcccaggccagcgggcagcagtggggggaggcggatctggcgcgcatgaaagcgctctccgacattggccttgagctatcgatcaccggcgggattactccggccgatctgccgctgttcaaggatatcaacgtcaaagcgtttattgccgggcgcgcgctggcaggcgctgcccatccggcacgggttgccgccgaattccacgcgcaaatcgacgctatctggggagaacagcatgcgtaaccacccgttaggtatttatgaaaaagcgctggcgaaggatctcagctggcctgagcggctggtgctggccaaaagctgcggttttgattttgtcgaaatgtcggtggacgagaccgacgaacgcctttcgcgcctggagtggacatcggcccagcgggcatcgctggtgagcgcgatgctggaaaccggcgtcgctattccctcaatgtgcctgtccgcccatcgccgtttcccctttggcagccgcgacgaggcggtacgcgagcgggcgcgggagattatgaccaaagccatccgcctggcgcgcgatctggggattcgtactattcagctggcgggttacgacgtctattacgaagagcacgatgaaggcacccggcagcgttttgccgaagggctggcctgggcggtagaacaggccgccgccgcgcaggtgatgctggcggtggagatcatggacaccgactttatgaactccatcagcaaatggaaaaagtgggacgagaggctttcgtcaccgtggtttaccgtctatccggacgtcggcaacctcagcgcctgggggaacgacgtcaccgccgagctgaaactgggtatcgatcgtatcgccgccatccacctgaaggacacgctgcccgtgaccgacaatagcccgggccagttccgcgacgtgccgttcggcgaaggatgtgttgattttgtcggcatctttaagacgctgcatgaactgaactaccgcggttcgtttctgattgagatgtggacggagaaggccagcgaaccggtgctggagattatccaggcccggcgctggattgaatcacggatgcaggaaggaggtttcacatgttagaacaactgaaagccgaggtgctggcggcaaacctggcgctcccggcgcaccggctggtcacctttacctggggcaacgtcagcgcggtggatgaaacgcgccgtctgatgatcattaagccctccggcgtcgaatatgaggtgatgaccgccgacgatatggtggtcgtagagatcgccagcggtaagatcgttgaaggcgctaaaaaaccctcttcggatacgccaacgcatctggcgctttatcgtcgctatccgcagatcggcgggatcgtgcatacccactcccgccatgcgacgatctggtcgcaggccggtctcgatctccccgcctggggcaccacccacgccgactatttttatggcgccattccctgcacccggccgatgaccgttgaggagattaacggggagtatgagtatcagaccggcgaagtgattatcaaaacctttgaacagcgcggtctggatccggcgcaaatcccggcggtattagtccattcgcacggcccgtttgcctggggtaaagatgcggccgacgccgtacataacgccgtggtacttgaagagtgcgcctatatgggcctgttctcgcgccagctggcgccacagctgccggatatgcagtctgaactgctcgataaacactacctgcgtaaacacggcgcgaatgcctattacgggcaaaactaacaccgtgggattcccggatggcggctaacgccttatccgggctaccggcggtctgcggtcccgtagcccgggcaaggcgctttgcgccgccccgggggaagcgtgcaggatgttgcagaattttcccggaggcgatgctgcgcatctgtccgggctacgcgtccccggcggtctgcggtcccgtagcccgggcaggcgctttgcgccgcccccgggggaagcgtgcagaatgttgcagaattttcccggaggcgatgctgcgcatctgtccgggctgctcgtccccggcgggaaaacccatcaaccctacgccgaattaatatgttccttgcagtaacgacgcttccacgccgcgggcgtcaggctggtatgcttacggaaaatcttgcgaaaatagccgacatcgttaaatccgcatttcatcgccacctcggtgagcgacagggaatcgctgataagcagcttttccgccgccctcacccgctgacggtgcagcgcttcggttaaggtcagccggaaaacatggcgataaatccgccccagataatcggcgttgcagtgcagctcctgcgccagcgtggatgcggaaaggggcaaatgaaaccgggtacgaatgatttgctgcgctctccacgccagcgcgttgccggggctgtcggcgggctgttcacccgctgccgccgaaacttgctgcagaatcagcagcaggatcagctccagcgccacgctacgatgaatattttcctgctcgcgtaagaattggcggaacaacgaaataatatactgcggctcgctgacgcgcgtgtgctgcggaatcgacagcagcgcctcaggcagcgaaacgttttcacctgaggtcacttcaaaatgcagccagtagaattttaaatctgccggaaattgcccgattccgacgtgtaaacgccgcggccagagcaataaactttccccggcgttgacgctaaaaatctcgttgttttcgcggatcgttaatgtccctttttccacaaagattatttcccaagagtgaagctgacgagccggatggctgccgatgcctcgggaaataaacaacccaccattttgcaccttaatcggaagtgacatggacaattcaagcatagacattcaatattccgcttttaatagcattaataacccctattgcctttgattattcacgataaaatagccgtctgctggatcgaaatcacatttttaccatcaggtcggaatcgtcctctttttatactttttccttcccttgttgcccccaacatttagtgcagaataaataacgtaatttgcaaataacacaattaaagcccgcacttcagcgggatattattcgcacatcatctccgggagttatttatgacttcggctccgattaccacaactgatttggcacagcgtgcccaggacgacaaattatcccttcgggaaaaaataggctacggattgggcgacgcgggcgggacggtgattacctgcctgatcatgaactttttaactttttctataccgatgtctttggcctgacgcccgcgctggtcgggaccctgtttctggccctgcgcgttttcgacgccgtttccgacccgattatgggcgtgctggccgaccgtacccagagccgctggggacgctttcgtccctggcagctgtggattgccgtgccgatcggcgttatcggcgtcctgacgtttaccgtgcccgacgccagcatgggggtaaaaatcgcctgggcgttcggcacctatctgctgctgtcggtgagctacaccgcgataaacgtcccctactgcgcgctgatcaacacgatgaccacgcgtcatagcgaggttatctcgtgccaggcatggcgctttgtcctgtgcggcgtggcgggattcttagtctccgttgggctgccgtggatggtaaaagcgctcggccagggcgataccgcacaggggtatcagtacggcgtcggcgtactctgcgccatcgcggtggcgatgttcctgtgctgcttcttctgggttcgcgaacgcgtctcgctggatgtcatggggaaatttaccctgcgcgagcacatcgccgggctgcgtaaaaacgaccagctgctgctgatgctggtgatgtcatttctgcttatcaacgtcttcaatatccgcggcggcggctacatgtacttcatcacctacgtgctgggcggctccaccggctacacctcgctattcttcaccatggtaaccttcgcctcgattgcgggctccgtcatcatcaacctgctctcgcgccgctttgataccgtcaaactctactactacaccaacctggtgctggccgctctggccgtggcgatgtggtttttgccaaccgggcaggcgtaccagaccctgtggctggtcgtcatcctcggcaacggcattattctcggctttaccctgccgctgcacttttcgctgatggccttctccgacgactacggcgaatggaaaaccggcgtgcgttcttccgggatgaacttcgcctttaacctgttctttatcaagctggcgtgggcctccagcgccggcattatcagcctcgtgtttatctacgtggcctatcagccgggcgtggaaaaccaaacggcatcatcactggcgggtatcgcctccatggagaccctgctgcccgccctgttccatctgctgctggccttcactattcgcgcctgcaagctcaacaattctatgatggcgcgcattgccagcgacctgcgcacgcgtcacgttcagccttaaggagtccgccatgtctgttatggaagtcgatctgcacaaactgaaaatcaacgacccgttcctcggccagtaccagcagctggtgcgcgatgtggtgatcccttatcagtgggatgcgcttaacgaccgtatcgaggaggcggacccgagccatgcgatagagaacttccgcatcgccgccgggcgacaggagggcgaattctacggcatggtctttcaggacagcgacgtggcgaaatggctggaggcggtggcctggtcgctgtgtcagaagccggaccccgggctggaaaaaaccgccgatgaggtgattgaactggtcgcggccgcccagtgtgaagatggctatctgaatacatatttcacggtcaaagcgccagaggagcgctggaccaacctcgccgaatgccacgaactgtactgcgccgggcacatgattgaagcgggtgtcgccttcttccaggccaccggcaaacgtcgtctgctggatgtcgtctgccgcctcgctgaccacatcgatagcgtgtttggccccggagataaccggctgcacggctaccctggccatccggaaatcgagctggcgttaatgcgcctgtatgacgtcactcaggagccgcgctatatcgcgctggtgaagtacttcgttgaggcgcgcggaacgcagccgcatttttacgatatcgaatacgagaagcgcggcaaaacctcctactggaacacctacggtccggcgtggatggtgatggataaaccctacagccaggcgcatcagccgatttccgaacagccggtcgccatcggccacgcggtgcgtttcgtctatctgatgaccggcgttgcccacctcgcccgtttaagtcaggacgagggcaagcgccgggattgcctgcgcctgtggaaaaatatggcccggcgtcagctgtatatcaccggcggaatcggttcgcagagcagcggggaggccttcagcagcgactatgacctgccaaacgacacggtctatgccgaaagctgtgcttccattggcctgatgatgtttgcccgccggatgctggagatggaagccgacagccaatatgccgacgtgatggagcgcgcgctgtataacaccgtgctgggtggaatggcgctcgacggcaagcacttcttctacgtcaatccgctggaagtgcatccaaaatccttaaaattcaaccatatttacgatcacgttaagcccgtccgtcagcgctggttcggctgcgcctgctgcccgccgaatatcgcacgggtactcacctcgctggggcactatatctacacgccgcacgacgacgtcctgtacatcaacctgtatgtcggcaacagcgtggagatcccggtgggcaatgaggcgctacgcctgcgcatcagcggcaactatccgtggcaggaacaggtgaagatagtcatcgattcatcttcaccggttaatcataccctggcgctgcgtctgccggactggtgcgataagccgcaggtcacgctcaacggcgcgccggttacgcaggacgtgcgcaaagggtatctgcacatcagccatctctggcaggagggcgacacgctacagttaaccctgccgatgccggtgcgccgcatttacggtaacccgctggtgcgccaccaggcaggccaggtcgccgtccagcgcggtccgctggtttactgcctggagcaggcggataacggcgagcaattgcataacctgcagctgccgcgcgacgcccggtttagcgctgtcgaaggcaaagggatttttgcccgcaagatacttctccaggcgccgggctataagcaaacggcggaagatgccgaaaaccaggccctatggcactatgaccgcgcgccgtcctcccgtcagccgcaagtattaacctttattccgtggtttagctgggccaaccgcggcgaaggcgagatgcgcatctgggtgaacgaagcggaagcgtaaatgtgagtgtgagcattccccggtggcgctgcgcttaccggggcgacaaggtttgtgcgttatcgtagcccgggtaaggcgttcacgccgcgacccgggactacctgcttatgctaaaggaacaatgccttatcgcgcagaatatgatcgttgccgcgacggcgggtaaaaccgatgcggtcgaaatattcgaggatctgaatcgccagcttgcgcccgacgttcagcgtatcgcggaaatccgccgcgcaggttgagcccctttccagatccaaatcgcggatcattttggcaaacgccacaatccgatcgttgcgatagtagcgatctttcacgatcgcggtaatcatcccctgctgcgccgcctggcgtaataccgcccgcattaacgactcttctacgttggcttcacgcgccagatcgcgtacccaccatggctcatcggcaaacagcccggcaacccgctgccagatggcctgctgctcgtcggtaaagcccgctttatgctccggcagatgcagccagccgtggtggctgtgaacaatgccgctttcgcgcatctgctcaatcaacagcagcaccagcgcttcatcttccatcggcagcgcaatacgccgcaggcgttcgcggcccggtcctggctcatcgcgatgctgatcgtgatagcgcgccagggcatcgagcagcttccgctgccagcgcgcggcgagcggggcgctcagcaggctatttcccgcctgcagatagtcagggcggtgaatcagcgcgttgaggccatcgcggctgagctgacgcgcccaggcgaaatcatcgaggcgcaccgcatcgcgctgaaggtgaatatccagcgcctggacgtcatcgccctgcgcggcggccagcgcgtgcagccactgtaaatactccggcttacgcttgccccggcgcggcggattgagggtcaccactcgcgcaccggccagcgtcaggcgcgcggaaatatcgcgcagcaccagacggtcgttatccgccagccgcagcggcgtatcgagaaccagctccgccagcgcgccttcgagcagcgacacgcggccggtaatatggctggcggcgtggtggatatgcagcggctgccactggctaagcggcgtatggcactgcagttcaacgatgacccgctcagaggcttccggcggcggtaccgccagcagccagtcgccgcggttgagctcctctttttgcgcatcgccggcaatattcagggcaatgcgctggccggcccaggcctgctcaaccggctgattctgcgcgtgcaaaccgcgcacgcgcatcggtttatccacgccggtcagccacagcgtatcgccaacgttgacctcgccggataacgcggtcccggtaaccaccagccccgcgcctttgacggtaaatgcccggtcgatggccaggcgaaagcgctgatgctgcgggtgcgcgcgcgcggagagctgcaggagatgctcgcgcagctcggcgatgccccgtccttccgtcgccgcgacggcaaacagggtcgcgccggtaaagccgaactccgccagcaccgcgtcgatttccgcctccacctcctcaatccgcgccgcttctacgcggtccgctttggtcagcgccacggttagcgttggctgcccggtaagctggaggatcgccagatgttcgcgggtttgcgccatcacgccatcatcgcaggccaccaccagcagcgcgtgatcgataccgccgacgccggccagcatattggacaaaaacttttcgtggccgggaacgtcgataaaacccagcacccgcccgtcgggctgcggccagtaggcgtagccgaggtcgatagtcatcccgcgcgctttctcttccggcaggcgatcggcgttgataccggtaatcgcctgcagcagcgtggttttgccgtggtcaacgtgtccggcggtggcaataatcatctcaataacatctccataaaccgggattcatcctcaagacagcgcaggtccagccacaggcggccatcgtagatcctgccaataaccggcacgggcaactgacgccaccgtgccgccagagcttccagccgactgccgcgcccatcgcgcggagtcaacgtcaacgccgcgctgggcaagcggtccaccggcagcgagccgctgccgatctgcgacaggcatggctcgacccgcaggtcaaaatcagcataatgtgcagccagcgcggcccgcatgcgctcgccctgcaggcggatcttgtccgcctggcgagtcagcagacgcagggtcggcagttcagcggccagcttttccggatgcagatagaggcgcaacgtggcctccagcgccgcgagggtcattttatccgcccgcagggcgcgcttaagcggatggctctgcaaacgcgcgatcagcgcttttttaccgacgataattcccgcctgcgggccgcccagcagtttatcgccggagaagcttaccaggctgacgccggcggcaatcatctcctgcggcatcggctctttcggcaggccgtactggcttaaatccaccagcgagccgctgccgagatcggccaccaccgggatattgagttcgcggccaatctccgccagcgccgcttcatcgaccgctttagtaaagccctcaatactgtagttgctggtgtgcaccttcatcagcaggccggtattgtcattcaccgcctgacgataatctttcgcgtgggtgcggttagtggtcccgacttcatgcagaacgcagcccgcctggcgcatcacgtcgggaatacgaaacgcgccgccgatctccaccagctcgccgcgcgacaccaccacctcactgccgccggcggttgccgccagcatcagcagcaccgccgccgcgttattgttgacgatacaggcgtcttccgcgccggtgatctggcaaagcaggtcggccagcgcgcgatcgcggtggccgcgtccggcatcgtcaagatcgtattccagcgtcaccggcgcgcgcatcgcctgggtcaccgcctctaccgccgcttccgcctgaatcgcccgcccaaggttggtgtgcagcacggtaccggtcaggttgaacaccgggcgcagcgcgctctgctgtcgctgcgtcaaacgacgcgaggtctccattagccacgcttcgcaccagtccggcagcgtctggttcaggcggatgtattcccgcgcctcgtccagcatctgacgcagctgcgccaccgtctgggcgtgaccgtattgcatcaacagcggtgaaaatgcggggtcgcggagtaaacggtcgatggccggaagccgggtataaagcgcacgaatttcgctagtcatgaatgaacctattttcccccctcccgacgggagagggagtcaacaaatgagcagcaattgtaatgcctccgcgcaaaaactgttacctgtctgggtcaactcaccggcggttcagtgcgcgcaaagctggcgcgctgaaagagggaatccaccaggcgcaccagcttcggtcgggtggcgcaccagcccggcgcgacgcggcggaaattgagataagcaatggcgcaggctgcggaaatggttgccagattaacctcatcaggacgtaatgtcccgtcactggcatacccttccagcgcatcaagcccgcgcgcaattttttcacgctggcgcagcagttcgctttccgactgctgggccgccgggcgcgttttctcccgtaccagcgtttgcgcagcctccatcacgccatcagccagcgcttcaatttgacgcaatttcagcgcagccttcggcgccgcaggcagcatatccggcgcgatgccgagcagctccagatattgcgcaataatgggcgagtcgtaccagcattcaccgtcgtcggtgaccagcgcggggacttttcccagcggattgtactgcgccacgccgttggtctcgtggtacgggaattcgttgacgaactcgaagggaatcgctttttccagcagtatgacggaaattttgcgcacaaagggactggtgtagctgccgatcagtttcattgcctgctcctttcgccaacaaagtagtaagtatggcgcaggcgcaggcaaatagcagagagagaaatcacctcatgccggaccgaccccgctaatggtccagataaagatagtgcatccagctggtcatccgcagcagcaccttgcgcatcaccgaaacgtgggtgaaatgatcggagtagaccgccacctgggcgtaaatgccgtcaggcagggcgtctacggcggcatcgggctccagctcaatggtcgccagcacgccgtcggtgcccggcgtcaccgtcagcgcctgcagcgtgccctgcgcctggtatgttccccccggtacgactggcaggatgctcaccagcttgccgcgaaagacctgtcccggcagcgcattgaacaccgcttcagcatcgtcgcccttctccagcctgagcagcgaattttgccggaactgcgccacaatcagccgtttttgctgggggataaagaccatcaccggacgcagcggcagcgaggcggcataggtcccaggacgaattaacacctgggtgatataaccatcgctgggcgcgcgcacggtcgtctgatcgaggttatatttcgcctccgccagctgcgcgcgcaggcttaccacctgcgactgttcgccgtttatcatgctgtcgagctggctctgaatttgcgcctgctccgccaccgatcctttcaccatcgcatcctgggcgaggtagttttgccgggcattatcgatatcgctttccgaaaacggattgacccgcgcctggcttcctttcaggtagcgctgataatccttatacagacggtcgcgctccgccgaaacgcgcgtggtgttggcctgagcctcagaaagctgggctttaagggtattgatactgtgcagcgcggtaacaaggtcggcctgtagccggtccacccgcgcctgataacgcaccggatcgatggtaaacagcacctcgccctttttaactcgttgatttgctttatcagtgacgctgctgaccaccccggtaacctgcggcgtaataggaatagaaataaccgctttttgcgcggtaaaggtatacggatggttgtagttcattaataagataagcgcgctaacaataaatacgccgcccagcgccgcggtgggaaccgtccatttatttaccgggatcttaaatattttaaatatcgaccaggcaatcgccacataggtcaaaataatcagcagatccatgagttatttctccaccgaaggaggttgagctgacggtctgagaccggttatttgctgctcgagcgcgataacccgctggcgcagttcgctgatgtcgtccccctcttccgccgcctcagacggcgtctcgtcccgccgatgctgcatgccccagccgcgttctggccggtaaagcgtggcccagatccataaaaacggccaaatgacgtgcagcgtaaaaaggctcacccagcccgcgacgtgaatcgcatcggcatgcgggtgattacgtttcttcgcgatcaggtaaggaatatcatggagaatgatgattccataaaaaatcaccagaaatacaaagatcagaacgccgagcgcaaaataattgagaaacataatttcctcggatttacgctaattattttcaggatgtgtgccgggccggatgaaaaaaagggccgacaaaatgagcataattcacccgtatcattttcgccattgacgactaaaatgttctttaagcgattgcgttgctgagtgacgtatcagcaagcggaacgcggcataacctgcgcgagatcacaccgagctaaatccaggtgaaaatattttgtgatgaacatcacaaacaaataacaaaacgtcaaagtaaatttgtgattttaatcacataaaaatgcattatccccccttaaaacccggtctgttgtttttttacacatcaattttgtgatgcagatcactacaaaagaccatcatcgccctatattcatgtgatccaaatcacataaaaatccaccgactggacagcttaacgattcagtgccagatttcgcactatcactcagggcccggctacctctgccgccttattaacaacaagcctcgggctttcagcctgccgatagcaaaaacagaagaaggggtgttttatgtcatccgatatcaagatcaaagtgcaaagctttggtcgtttcctcagcaatatggtgatgccaaatatcggcgcgtttatcgcgtggggtattatcaccgcactattcattccgacaggatggttaccgaacgaaacgctggcgaagctggtcggtccgatgatcacctatctgctgccgctgctgatcggttataccggcggtaagctggttggcggcgagcgcggcggcgtggtcggcgcgattaccaccatgggcgttatcgtcggcgcggatatgccgatgttcctcggctccatgatcgccggtccgctgggcggctgggcaattaaaaaattcgacgtctgggtagacggtaagatcaaatccggttttgagatgctggtgaataacttctccgcgggcatcatcggtatgatcctcgccattctggcgttcctcggcattggcccggcggttgaagtcctgtcgaaaattctggccgcaggcgttaacttcatggtggcgcacgagatgctgccgctggcctctatctttgttgaaccggcgaaaatcctgttcctcaacaacgccattaaccacggtattttctcgccgctgggtattcagcaatcccacgagctgggcaaatccatcttcttcctgattgaagctaacccgggtccggggatgggcgtcctgctggcgtatatgttcttcggccgcggcagcgcgaaacagtctgcaggcggtgcggcaatcatccacttcctcggcggtattcacgagatttacttcccgtacgtgctgatgaacccgcgtctgattctggccgttatcctcggcgggatgaccggcgtattcaccctgactatcctcaacggcgggctggtctctccggcttctccgggttctatcctcgccgtgctggcgatgacgccgaaaggcgcttactttgctaacatcgcggcgattattgcggcgatggccgtctcctttgtggtcgcagccgtgctgctgaaaaccagcaaagttaaagaagaagatgatatcgaagccgcgacccgtcgcatgcaggatatgaaagcgcagtccaaaggcggcgccacgccgctggccgctggcgatgtcgcgaacgacctgagccacgtgcgtaaaatcatcgtcgcctgcgacgccggtatgggctccagcgcgatgggcgcaggcgtgctgcgtaaaaaagtgcaggatgccgggctgagcaacatctccgtgactaacagtgcgatcaacaacctgccgccggatgttgacctggtcatcacccaccgcgacctgaccgagcgtgcgatgcgtcaggtgccgcaggcacagcatatttcgctgaccaacttcctcgacagcggcctgtacaccagcctgaccgaacgtctggtttcggcgcagcgccacacggataacgaagagaaagtccgcgacagcctgaaagacagcttcgatgcgtctgacaccaatctgttcaaactcggcgcggaaaacatcttcctcggtcgtaaagcggcgaccaaagaagaagcgattctgtttgccggcgagcagctggtgaaaggcggctacgttgagccggaatacgtccaggcgatgctggaccgtgaaaagctgacctccacctatctgggtgagtccatcgcggtcccgcacggcactatcgaagccaaagatcgcgttctgaaaaccggcatcgtcttctgccagtacccggaaggcgtacgcttcggcgaagaagaggacgaggtggctcgcctggttatcggtattgccgcgcgtaataacgagcatatccaggtgattaccagcctgaccaacgcgctggacgatgaatcggtcattgagcgtctggcaaaaaccaccagcgttgaagaagttctgacgctgctgaaagcgtaatccgtcacccggcggtacgccgggcaacgccccctctctccttacgcgtggggagagagggttggggtgagggaaacgcctgaccccagccctctcaggtaaaaacattaattgaaggttaatactatgaaagcattacattttggcgcaggtaatatcggtcgtggctttatcggcaaactgctggcggacgcggggatacagctgacgtttgcggatgtaaatcaggtcgtgctcgatgccctgaatgcccgtcatagctaccaggttcacgtggtcggcgagaatgagcaggtcgataccgtttccggcgttgacgccgtcagcagcatcggcgacgaagttgtagagctgattgccagcgtggatctggtgaccaccgccgtcggcccggtcgtgctggaacgcatcgccccggcgattgccaaaggcctggccaaacgtaaggcgcaggggattaccgccccgctgaatatcatcgcctgcgagaacatggtccgcggcaccacccagctgaagggtcacgtttttaacgccctcgccgaagaagacaaagcctgggttgaagccaacgtcggcttcgttgattccgccgttgaccgcatcgttccgccgtcggcttccgccactcacgatccgctggaagtcaccgtggaaaccttcagcgagtggattgtcgataagacccagttcaaaggcgaactgccgaacatcccaggtatggaattaaccgataacctgatggcatttgtcgaacgtaagctattcaccttaaacaccggacatgctataaccgcctacctcggaaaactggcgggtcatcagacgattcgcgacgcgattcttgatgagcacattcgcgccgtggtcaaaggcgccatggaagagagcggcgcggtgctgatcaaacgctatgtctttgatgcgcaaaagcacgccgcttacatccagaaaattatcggtcgttttgagaacccgtatctgaaggatgacgttgagcgcgttggccgccagccgctgcgcaaactgagcgcgggcgaccgcttaattaagccgctgctcggtacgctggaatacggcctgccgcaccgcaatctggtgaaagggatcgccgctgccatgcacttccgcagcgaagaagacccgcaggcgcaggaactggcggcgctgattgccgagaaaggcccacaggccgcgctggcgcagatttcgggtctggacgcagcaagcgaggtggtggcggaagccgttaacgactataacgccaccaaatgaggcaagacctggcgcggtccgaaccgcgcccattactcatgtcagatatgcaggcaataatggaagaaacacaggcatttgaaaaccgtgtgcttgaacgtctgaatgctggcaaaaccgtaagaagcttcctgatcgccaccgttgaactgctgacggaagcggtcaatattctggtgcttcaggtattccgtaaagacgactacgcggtgaaatacgcagtggagccgttgctggacggcgacgggccgcttggcgacctttctgtacgcctgaagctgatttacggccttggggtgattagccgcgccgaatatgaagacgctgaactgctgatggccctgcgcgaagagctgaatcacgacggtaatgagtatagctttaccgacgatgagatcctcggaccgtttggcgagctgcactgcgtcgccgccctgccgcccacgccgcaatttgatgagagcgatgctgaactgctggcaatgcaaaagctgcgctaccagcaggtcgtacgttccacaatgatgctatctctgaccgagctgatttctaaaatcagcttaaaaaaagcctttcaaaaatcaacgctctgattctggctcttgctggtcgcacgtcggccgataaagctgacgataatactcaagacgccgcagaaatagcgcttctttatctgccgggatatccggcggtatatgctgcaaacgcggagatttttttagatattccataaaagcctgacttgaagccataaaatctacggctttatcaataatgcgcggtacgctgtcgcctattttcgccatcacgctctcctcttttgggggaatgatcctattaaggattagccaaaaacagggtttcagatgaggaaaacgtgctgaatggccgtcaggcttcacagaaatgaatattcgccaactctgggttaaaatgatttttatattcaataagttataatatgccgctgcggttgttatgagcaaaaaacggcgacgttttgataaataactacccacaacccaagcgacagcacatactatagtctgataacgcccctttcttaatagattaagccaccatgaaagaagtcgaaaaaaacgaaattaaacgtctgagcgatcgtcttgacgctatccatcaccagcaggccgacctgtccctggtcgacgccgcagaaaaatacgccgagctggaaaaagagaaagccaccattgagacggaactcgttcgcctgcgtgaggttcagggccagaagctgagcaaagaagcgcaaaagctgatgagcatgccgcatcgccgcgccatcaccaaaaaagagcaggccgatatgggtaagctcaagaaaagcgtacgcggtctggttgttgtccacccgatgaccgcgctgggccgcgaaatgggcctcaaagagatgaccggcttctcaaaaaccgcgttctgatatcttcatcccgtgaatctcccggctcgcgctacgcttagccgggctacgggttcacagccctctgcgagagggtagcccggacagacgcgcagcatcgcctccgggaaattcagctactctgcgctctgctccccggtcgcggctaacgccttaccggggctacgggttcaccgccgtctgcggaccggtagcccggacagatgcgcagcatcgcctccgggaaattcagctactctgcactctgctccccggtcgcggctaacgccttaccggggctacgggttcaccgccgtctgcgggccggtagcccggacagatgcgcagcatcgcctccgggacaggctctgtttcaaacgtcattccccactaattggccctaccaatgttttcttaaatcgtccaatggttcacatatccatcatttttcgtcacagacatattgctcatcaataacatttgattaaccattcgttgtcgttaatcctacaatcgcaatttggctgggccagttttacaaatgatgtgacctgctaagagcgcaagactcagcacggcatcataacggcccgatggagacctgcatgaacctctggcaacaaaattacgatccggccggcaacatctggctatcgagtcttatcgcatcgctaccgattctgtttttcttttttgccctgataaagctcaagctgaaagggtacgttgccgcgacctggaccgtgctcattgcgctctccgtcgctctgctgttctacaaaatgccggttgaccacgcgctggcctccgtcatctacggcttcttctacggcctgtggccaatcgcgtggattattatcgctgcggtcttcgtctataaaatctcggtgaaaaccgggcagttcgacattatccgctcatcgattttgtcgatcaccccggaccagcgtctgcaaatgctgattgtcggtttctccttcggcgcgttcctcgaaggggccgccggttttggcgcaccggtcgccatcaccgcagcgctgctggtggggctcggctttaacccgctgtatgcggcgggcctgtgtctgatcgttaacaccgcgccggtcgcgtttggcgcgatgggcattccgattctggtcgccggacaggtgacgggcctcgacagcttcgaaatcggccagatggttggccgtcagctgccgttcctgaccatcatcgtcctgttctggatcatggcgattatggacggctggcgcggcattaaagagacctggcctgcggtcatggtcgccggcggctcctttgctatcgctcagtacctcagctctaacttcctcggcccggagctgccggacattatctcttcgctggtatcgctggtctgtctgacgctgttcctcaaacgctggcagccggtacgcatcttccgcttcggcgatatgggcgcatcgcaggtcgatatgaacctggcccgcacgcattacacgccgggacaggtgattcgcgcctggtcgccgttcctgtttctgaccgcgacggtgaccctgtggagcgtgccgccgttcaaagcgctcttcgcccccggcggcgcgatgtacgattttgtgattaatatttccgtgccgttcctcgacaaaatggtggcccgcatgccgccggtggttagcgaagccacgccgtacgccgcggtctataagtttgactggctctccgccaccggcaccgccatcctgttcgccgcgctgctttccatcgtctggctgcgcatgaagccaaaagacgcgatctcgacctttggcagcacgctgaaagagctggcgctgccgatttactccatcggcatggtgctggcgttcgcctttatttccaactattccggtctatcctcaacgctggcgcttgcgctggcgcacaccggtcatgcatttaccttcttctcgccgttcctcggctggctgggggtatttctgaccggttcggatacctcgtctaacgcgctctttgccgcgctgcaggctacggcggcccagcagattggcgtctccgatatcctgctggtcgcagcgaacaccaccggcggcgtgaccgggaaaatgatctctccgcagtctatcgccatcgcctgtgcggcggtcggtctggtaggtaaggagtccgatctgttccgttttaccgtcaaacacagcctgattttcacctgtatggtcggtgttatcaccacgctgcaggcgtatgtcttaacctggatgatcccgtgatagtgatgccaaaacgccttgccgacgacgtcgcccgtcgtgtgcgggcgctgattgaagaacaaaagctggaggcgggcatgcgattgcccgccgaacgtcagctggcggcgcagctgggcgtatcgcgcaattcgctgcgcgaagcgctggcgatgctggtcaacgaaggggtgctgctcagccgtcgcggcggcggcaccttcgtgcgctggcagcacgaagcgtggtcggagcaaaacatcgttcaaccgctgaagacgctgctctccgacgatcccgattacagctttgatattctcgaagcccgtcacgccatcgaagccagtaccgcctggcatgcggcgatgcgggcaaccgatgccgaaaaagagaaaatccgcctctgctttgaagccacccaaagcgaagaccctgacctggcctcgcaggccgatgtccgcttccatctggcgatcgccgaagcgtcgcacaacgtggtgctgctgcaaaccatgcgcggtttttttgaccttttacagtcctcagtcaaggagagccgccagcggatgtatctcgtcccgccggtcttcgctcgcctgaccgaacagcaccaggcggtcatggaggcgattatcgccggtgacccggaaggtgccagacaggcgatgatggcccatttgggctttgttcacgccaccatcaaacgctttgatgaagaccaggcccgccaggcgcgaattacccgcctgcccggtgaccataacgaaaattccagggagaacttgtgatgattatttccgccgccagcgactaccgcgccgccgcacagcgtatcctgccaccgttcctgttccactatatcgacggcggcgcttacgccgagcacaccctgcgccgcaacgttgaggacctgtccgacgtcgcgctccgccagcgcattctacgcaatatgtcggacctgagcctggaaaccaccttattcaacgaaaagctggcgatgccaacggcgctggcgccggtggggctgtgcgggatgtacgcccgccgcggtgaagtgcaggccgccggcgcggcggatgaaaaaggtattccgtttaccctctctaccgtttccgtctgcccgattgaagaggtcgccccgaccattaagcgcccgatgtggttccagctgtacgttctgcgcgaccgcggttttatgcgcaatgcgctggagcgggcgaaggcggcgggctgttcaacgctggtctttaccgtcgatatgccgacccccggcgcgcgctatcgcgatgctcactccgggatgagcggcccgaacgcggcaatgcgccgctactggcaggcggtgacccatccgcagtgggcatgggacgtcgggttaaacggccgtccgcacgatttgggcaacatctccgcctacctcggcaagccgaccggtctggaggattatatcggctggctggcgaataacttcgatccttcgatttcctggaaagaccttgagtggatccgcgacttttgggacggtccgatggtgatcaaggggatcctcgatccggaagacgcccgcgatgcggtgcgcttcggcgctgacgggatcgtggtttccaaccacggcggccgccagctcgacggcgtgctctcttccgctcgcgctctgcccgcgattgccgacgcggttaaaggcgatatcacaattcttgccgacagcggtattcgcaacggccttgatgtggtgcggatgattgccctcggcgccgatagcgtgctgctgggccgggcttatctgtatgcgctggccacccacggcaaacagggcgtcgccaatctgctgaacctgatcgagaaagagatgaaggtggcgatgacgctgaccggcgcgaaaaccatcggcgaaatcagccgtgaatctttagtccagaacgccgatgcgctgcggacctttgatgcgatcaaagcgggaaacgcggcggttatccctgaccctcacccacagggagagggaaccgtccggcaggcgggttaacgtcctcatcaggccatccggctcacagggcggcgccggttttctcccgctctctttccgggagaggagcagggtgagggttaaccaaatatctgctattctgcccccgcaattaagggggcagcatgcttaacatcgtcttattcgaaccagaaatcccgccaaataccgggaatatcatccgcctgtgcgccaacaccggcttcaatctgcatattatcgaacccatgggttttgcctgggacgataagcgtcttcgccgcgcaggtctggattaccacgagtttgccgccgtccagcgccatggtgattacgccgcctttattgaaagcgcaaagccgcagcgcctgttcgccctgacgaccaaagggacgccggcgcacagcgcggtaagctatcaggacggcgattttctgctgtttggcccggaaacccgcggactgccgggcagcattcttgatgctctgccggcagaacaaaaaatccgtattccgatgatgccggacagccgcagcatgaacctgtcaaatgcggtgtcggtggtggtctatgaagcctggcgccagctgggctatcccggcgcggtgctgcgcagctgagctcgctttctcccggaggcggcgcgtagcgcctgtccgggctaccagacagcgctcggttttgtagcccggacagatgcgcagcatcgcctccgggaaatcaatcaaataccgtcgccgtactcgaaggtatggtgtatgccgttaaagtgctgatccatatccatcgcgggtttatcgctctccggcttgcccacaatgcgggcgggaacgcctgcggcggtagtatgcggcggcaccggctgtagcaccaccgaacccgcgccgatttttgccccgcgtccgacttcgatattgccgaggattttcgccccggcgccaatcatcaccccttcgcgaattttcggatgacgatcgccgctggttttaccggtaccgcccagggtcacggattgcagaatcgatacgtcgtcttcaatcaccgccgtttcgccgacgacgatgccggtggcgtggtccagcatgatcccgcgaccaatcttcgccgccgggtggatatccacctggaacgatacggaaacctgattttgcaggaagatcgccagcgcccgacgcccctgattccacagccagtggccgatacgataggcctgcagcgcgtggaatcctttcagatagagcagcggggtggagtatttatccaccgccgggtcgcgcgttcgcaccgcctgaatatcgcaggcggcggaggcgatcatttccgggtcggcggcgtaggcctcttccaccacttcacgaatcgcgatggcgggcatgatcggagaagccagtttattcgccagcatatagctcagggcgctgccgagattttcgtgcttgagtagcgtggcgtggtaaaaactggcgagcattggctcacagtcagctaaagcccgagcttcggctttaatattattccagacgatatccagttcttcacacggcattgctgactccagacgatataataatgaccggccagttctttgctggccgggtcattcaggtgatccaggttccatcgcagttagttgctacgctcgtccttgcgtgcacgacctaataaggtcaatgctgcctcgcgcgcaatttttccgcaatacaatacctgataaatttcctcggttattggcatttcgacgcctaaacgctgcgccagaacgcgaacctctttggtattgcgatagccttcaaccacctggccaatcttctcctgcgcgctttgcacatccatgccctgaccgagcatcatgccgaagcggcggttacgcgactggttatcggtgcaggtgagcaccagatcgcctaagcccgccatccccataaaggtctccggatcggcgcccagggcctccccgaggcgcgacatctcaaccagcccgcgggtaatcagcgcggtacgcgcgttggcgccaaagccgatgccgtcagacatgccggcgccgatagcgatgacgtttttcaccgccccgccgagctgcacgccgataaagtccgggttgatatagacgcggaagctcttgccgcagtgcagcaggctttgcaaatcgtcagcgaactgcggatccgtcgacgccagcgagatcgccgtcggcaggcctgccgccagctctttcgcgaaggtcgggccggaaatcaccgccagggggatagcgtcgcccagcgcttcacgggccacgtcctgcagcaggcgcccggtttccgcttccagacctttcgtcgcccataccaggcgagcgtcggggcgcatcagcggtttaatctgccgcagcacctggccgaaaacgtggctcggcacgacgacgaggatatcgcggctggccgccagcgcggtcgccagatcgctttccagatgcagcgtgtcggggaaaggaacgtcaggaagaaatgcggcgttgcagcggtcgtgctgcagcgtcgcaatatgtttcgggtcatggccccacagcacaacgtggtggccatttcttgccagggtgatggcaagagcggtgccgtaagagccggcaccgatcacagtcattgcagcgttaagcgcgttcatcaggcatcctgatgttgttcagcaccttcgccagcctgctgctgcagatagttcataaacagcgcatcgaagttcactggcgcaaggttcagttgcgggaaggtgccgcgggaaaccaggctggtgatgcactcacgcgcgtacgggaacagaatgttcgggcagtatgcgccgaggcagtgcgccatctgggtgccgtcgatgccttcgatggagaaaataccgccctgctgtacttcgcacaggaatgcggtttcttcgcccagagaggcggttacggtcacgcgcagcaccacttcatacacgccttcagccagctggctggaagcggtatccagatcaagtttaacttccggctgccaatctttctggaaaacttgcggcgcgttcggcgcttcaaaagaaatatctttggtgtagatgcgctgaatctggaaagtcatttcggtgctgttttgttctgacatagtaaaaccctttcgtgttgtccttaagtacgcccgtccaatggggatgagcgcaaaaattagcgcaggaggggatcgagtccaccacgtgaatcaagcgcgtacaagtcgtcacagccgccaatgtgctgcgcatcaataaaaatctgcggaaccgtcgttcgaccgctgcgctgaatcatctcttcacgcttcgcagcatcgccatcgataggcaactcgttgaacgtcacgcccttgctgttcagcagcgcttttgcacgtacgcagaacgggcaggtcgctttggtatagatatcaatattggccatgacttcactcctgtttttacccccgagagttttacgccgcaggcgttgttttcccgctgacgaatagccgccgcagggaaaaccgcgctacgccataaagacgcgggtaaattatttaccgcgtaccagcggaaggttctcgccgctccagccagcgatgccttctttcagtacgaagaccttttcaaaaccggctttgttcagcgcgctggcgggttcttgcgcctgcatacctgagccgtctaccactataatgggttgtgctttgtgcttttccaactcgccgacgttatttgctttgatatcgctcggcagcaggttaatagaacccgcaatgtggcctttacggtaatcgtcacgctgacgcaggtcgacaaccacggcatcttctttgttgatcaggcgcgtcgcttcaccgcgggtgatgactttaactttcgacatcagccctttaaaggtggtgaacagcaccgccaccagcagcgcgacccacgcgatgctcaggacggggtgacggctgatgaattgcataatttcttgcatggggggttacaactcccgactaagtgataaaaaaaccagggaaggagtatacctgtgcattgcggcaaatacagccagtgagcgcgatgtaatgtattttctgcggcccgtcacgaaaaaaaaccgctctcgccgcggcaatgcgctctggccgccctctttctttgatcttttacggtgatttgatcgattcagctgtagtaaaattacgcaaattttctgtctttgagcatgaggttgtcgcaatgtcggtttctaaaaaacctatggtactggtgattctggatggctatggctaccgtgaagaccagcaggataacgctatttacagcgccaaaacccctgttatggacgcactgtgggcgaaacgtccgcataccctgattgatgcttcaggcctggaagtcggtctgccggatcgtcaaatgggcaactccgaagtgggccacgtcaacctcggcgcgggccgtatcgtgtatcaggatctcacccgcctggacgttgaaatcaaagaacgtaccttcttcgccaacccggtactgaccggcgcggtcgataaagccgttgccgcaggcaaagccgtgcatatcatgggcctgatgtctccgggcggcgtccacagccacgaagaccacatcatggcgatggttgagctggcagccgaacgcggcgcggataaaatctatctgcacgccttcctcgacggccgcgatactccgccgcgcagcgctgaaaagacgctggcgaaattcgaagacaaatttgccgcgctgggcaaaggccgcgtcgcctcgatcgttggccgctactacgccatggaccgcgacaaccgttgggaccgcgttgagcaggcttacgatctgatgaccctggcaaaaggcgagttccaggccgataccgccgttgcgggcctgcaggccgcttatgcgcgcgatgaaaacgatgagttcgtgaaagcgaccgttattcgcgctgaaggccaggccgatgcggcgatggaagacggcgatgcgctgattttcatgaacttccgcgccgaccgcgcgcgcgaaattacccgcgccttcgttaacgccgatttcgacggcttcgcccgtaagaaagtggtgaacctcgatttcgtcatgctgaccgagtacgccgcggacattaaagtcgcctgcgcttatccgccggcatctctggtgaacaccttcggcgaatggatggcgaagaacgacaaaacccagctgcgcatctccgaaactgaaaaatacgctcacgtgaccttcttcttcaacggcggcgttgaagagccgttcaaaggcgaagagcgcattctgatcaattcaccgaaggtcgccacctacgatctgcagccggaaatgagctccgctgagctgaccgaaaaactggttgccgccatcaagggcggtcagttcgacaccatcatctgtaactacccgaatggcgatatggttggccacaccggcgtaatggaagccgccgttaaagcggtcgaagcgctggatgactgcatcgaccaggtgagcaaagccgttgaatccgttggcggacagctgctgatcaccgcagaccacggcaacgccgagcagatgcgcgatccggccaccggccaggcgcacaccgcgcacaccaacctgccggttccgctgatttacgttggcgataaaaacgtcaaagcggtcaacggcggcaaactttccgacatcgcgccgaccatgctgacgctgatgggaatggaaatcccgcaagagatgactggcaagccgctgttcatcgtggaataatccttccccatgaggggaaaggcgacgtattcaactacatggatcgcaacggcagttcgatccgtcttttacgccagcgcgcttagcgctggcgtattgctgtgcgccgcatctgctcacgccgacgatcgcgaccagcttaaatccattcaggccgatatcgccgctaaacagcgggcgattaagcagcagcagcagcagcgcgcttccctggtcgcccagctaaaagcgcaggaggaggccatctccgccgccgcgcgcaagctgcgcgaaacccaggaaacgctgaaccagctgaataagcagatcgacgaaatgaacgccgcgctggccaagctggagcgtcagcgcgcctcgcaggagcgtaacctttccgcgcagctcgacgccgcatttcgtcaggggccgcataccggcatccagatgatcctcagcggcgaagaggggcagcgtaatcagcgcctgcaggcctactttggctatctgaaccaggcgcgccaggaaaccatcgcccagctgaagaaaacccgcgaagacgtggcggtgcaaaaatcgatgctggaagagaaacagagccagcaacaaaccctggtgtacgaacagcgcgcccagcagagcaagctggagcaggcgcgcaacgaacgtaaaaagaccctcgccagcctggaatcctccattcagcaaggccagcagcagctcagcgagatgcgggctaacgaatcacgcctgcgcggccgtatcgcccaggcggcggcggcggccaaagcgcgggcggatcgcgaagcccgcgaagcgcaggatgtgcgcgatcgccagcaggaagcctcgcgtaaaggcaccacctacaaacctaccgaaagcgaacgctcgctgatgtcccgcaccggcggacttggctcaccgcgcggccaggcattctggccggttcgcggctcaattctccatcgctatggcgaacagctgcaaggtgaactacgttggaaggggatggttatcgctgcgtctgaaggcaccgaggtcaaagccgttgccgatggtcgggttattctcgccgactggctgcagggctatggcctggtggtggtcgttgaacacggcaaaggcgacatgagtctttacggctataaccaaagcgcgctggtcagcgtcggcactcaggtccgggcgggccagccgatcgctctcgtaggcagcagcggcggtcagggccgtccgtcgctctatttcgaaattcgccgccagggtcaggcggtcaatccacagccgtggttgggaagataagttttgcttcaatttcgcagaattgcactcgcggtaaccggtacgctggttatggcgtcgccggtttttgccggcaaactctccattgttatcgacgactttggctatcgtccacaaacggaaaaccaggtgctggcgctgccagcgacgatctccgttgccgtccttcctaatgcgccccacgcccgagaaatggcgaccagagcgcataatctcggccacgaggtgctcatccacctgccaatggcgccgctcagcaaacagccgctggaaaaagacaccctccgcccggatatgaacagcagcgagatagagcgcattatccgcgaagcctacggtaaggttccgtacgccgtggggctgaataaccatatgggcagcgccatgacgtcgaatctcttcggcatgcagaaggtgatgcaggcgctcgagcgctacaatctctacttcctcgatagcgtcaccatcggcaatacccaggccatgcgcgcggcgcagggcaccggcgtaaaggtgattaagcgtaaggttttcctcgacgatacccaaaacgaagcggatatccgctatcagttcagccgcgctatcgctttggcgcggcgcaacggctccgccattgctatcggccacccgcacccgacgacggtgcgcgtgctgcagcagatggtgtataacctgccgccggatatcactctggttcgcccgagcagcctgctcaacgagccgcaggtggatacctcaacgccgaacacagcgccgccgtccgttcagccgccgcgcaatccgttccgcggcgtgaaacagtgcaaatctaagcgcccgccggagccggtcaacgccagccgcttctttaccattcttagcgaaagcatcactcagagcacgctggtgcagtattaccagctgaagtggcagggctgggataagcctaccaactaaatcatccgggaatccgtgtgcttatccgccgcggattccggcttgtcctgatgggcataccaggctttaaagtatttaagaaagctgtaacaggtcgcgtaaagcccggtgaccacgccaaccttgccctttcgccacgctccgctgaacagataccacttaaagaaagcgccaatcgcgctgatcgctccgcgcgcaagagacggcctgattttctggtgtttaaccagccgcgtggtgtagctattgagcttactaaacacttcatgcagggagtagaaggtatcgtggcgcacgaatcccggtagccgggcagagtgcgtaaagccaaccacctgatcgtctaccggccgatcgttgaacctggcgacggagcgattaaacaagcgaaccgggaaatccggcgatgataccggataaatggtgcgcacctcttcacccagcacgaaccagtagcgcggcagacgccatgcgcaggcggggtccggctcatcgccggccttgagcgccagaattgccgccaccacctcgtcgtcaaggatctcatcgctgtccacacacagcacccagtcgtggcgggccagagaggtcgcataattcatctgcgtaccgtgagcggtataaggatgatggtgaacggagagaccgaactgttggcaaatctgcagcgtagcatccgtactgcctgaatcgacgacgataaattcatcagccaccctgagcagcggcggtaacacctcccgtaataagcgggatgaattacaggtcaataagcatacagaaagtttaagcataatctttatagggttaaaccatggttaaactgactgtataaacgaataggcgagaaagcgatttagaaaaagtgcggagtggattaagtatcacaaaattgtaggataactctcaaaaaagcgcccgtgggcgcttttttaccatcctgaccggggcggaattaatcccagctgagaatgactttgccagactggccggagcgcatcgcgtcaaagccctgctggaaatcatcaatgccaaagcggtgggtgatgatcggcgacagatcgagcccggactggatgagcgcggccatcttgtaccaggtttcgaacatttcgcgaccataaatccctttgataaacagccccttgaagatcaccttggtccagtcgatagacatatccgacggcggaatacccagcatggcaatacgcccgccgtggttcatggtatcgagcatggtgcggaacgccggcggcgcgccggacatctccagacccacgtcgaaaccctcggtcatgcccagctcggccatcacatcgttaaggttctctttcgccacgttcaccgcccgggtgacgcccattttgcgcgccagctccaggcgatattcgttaacgtcggtaatcacgacgttgcgcgcgccaacgtgtttcgccaccgcggcggccatcacgccgatcgggccggcgccggaaaccagcacatcttcaccgacgaggtcgaatgaaagcgcggtatgcacggcgttgccaaacggatcgaaaatcgacgccagatcgtcagagatattgtcggggattttaaaggcgttaaacgccgggatcaccagatattcggcaaaacagcccggacggttgacgccgacgcccgtcgtattgcggcacaaatgcgtacgcccggcgcggcagttacggcagtggccgcaggtgatatgcccttcgccggaaacgcggtcgcccagcttaaagccgcgaacctcctgaccgatacccaccacttcgccgacgtattcatgccccaccaccatcggaaccggaatggtcttttgcgaccactcgtcccagttgtagatatgcacgtcggtaccgcaaatcgcggtcttgcgaattttaatcagcagatcgttgtggccgacttccggttccggtacgtcggtcatccagatgccttcttccgcctttagtttggataacgctttcatctcacaccctcaggcaatgacgcccagttgtttaccgatgcgggtaaaggcttccaccgcacgttcaatttgttcaggggtatgcgccgcagacatctgggtacggatacgcgcctggccttttggtaccaccgggtagaagaatccggtgacgtaaataccttctttttgcagctcgcgcgcgaactgctgcgccacggtggcttcaccgagcatcaccgggataatggcgtgatcggcgcccgcaagggtaaatcctgccgcggtcattttttcacggaacaggcgcgcgttagcccacaggcggtcgcgcagctcgctgcccgcttccaccatctccagcactttgatggaggcggcgacaatcgccggcgccagcgagttggagaacagatacggacgcgagcgctggcgcagccactcgacgacttctttgcgcgcggcggtatagccgccggacgcgccgcccagcgctttacccagcgtaccggtgataatgtcgacgcggcccatcacgtcgcagtactcatgggagccgcggccgttttcacccacaaaacccacggcgtgcgaatcatcgaccatcaccagcgcgtcgtatttatccgccagatcgcagacgcccttcaggttggcgatcaccccgtccatggagaacacgccgtcggtggcgatcagcacatggcgcgcgccggcttcacgcgcctctttcagacgggcttccagctcctgcatatcgttgttggcatagcggaagcgcttcgctttacacaggcgcacgccgtcgatgatcgacgcgtggttcagggcatcggagataatcgcgtcctctgcgccgagcagggtttcaaacaggccgccgttggcgtcgaagcaggaggagtacagaatcgcatcctccataccgagaaaatcggccagcttcttctcaagcgctttgtggctgtcctgggtaccgcagataaagcgcacggaggccatgccgaagccgtggctgtccatcccgcttttcgcggcggcaatcagttccgggtggttcgcgaggccgagatagttattggcgcagaagttaatgacctggctgccgccgacggtgatatccgcctgctgcgccgaagtgataatccgttcttctttaaacaacccttccgcgcgcgcggtatccaggtcattggttaactgtttgtagaaatccccacgcattgcaactctccagattcggcaaaatttggcacatattacctaaagctatacgctgatacgagatgatgcattactgcatgaattatttgcagcataaatcacgagtccctctctaccttatcggcgaatggctgaagcctttccgatgtagtgatatgataggagtattcatgtccggattgtctctggactaccaacttcaaaggttacagttatgatcatcgttaccggcggcgcaggctttatcggcagcaatatcgttaaagcgctgaatgaccagggtattaccgacattctggtcgtagataatctgaaagacgggaccaaattcatcaatctggtggatttgaacattgccgactacatggataaagaagactttctgatccagattatggcgggcgaagagttcggcgatatcgacgctattttccatgaaggcgcctgctcttccaccacggagtgggacggcaagtacatgatggataacaactatcagtattccaaagaggtactgcactactgtctggagcgtgaaatcccgttcctgtacgcctcttccgcagcgacctacggcggccgcaccagcgactttattgaatcccgcgaatacgagcagccgctcaacgtttacggctactccaagtttctgtttgatgaatacgtccgtcagatcctgccggaagcgaactcgcagattgtcggcttccgctatttcaacgtctacgggccgcgcgaaggccataaaggcagcatggccagcgtcgctttccatctgaacacccagctgaataatggcgaaagtccgaaattgttcgaaggcagcgacggcttcaagcgcgacttcgtctacgtcggcgacgtcgcggcggtgaacctgtggttctgggaaaacggcgtttccggcatcttcaacctcggcaccgggcgcgcggagtctttccaggccgttgcagacgcaacgctggcttatcaccagaaaggcagcatcgagtacattccgttcccggataaactcaaaggccgctatcaggcgtttacccaggcggatctgactaacctgcgcgcagcgggctacgataaaccgtttaagaccgttgccgaaggcgtaacggaatatatggcctggctcaatcgcgacaatcatgcgaattcataaaatcattcgagcggtatcaaggcggcaactcagtgattctccgggagctgactaaaatcagtgaccggagggaacgcaggcagccaacgcagagacagcttgaaggatggaatgaatgaaaatattggtggttggcccgtcatgggtgggcgacatgatgatgtcgcaaagtctttaccgtacgctcagggcgcgctatccccaggcgataatcgacgtgatggcgcccgcatggtgccgtccgctgctatcgcgcatgccggaagtcaacgaagcgatcccgatgccgctcggccacggcgcgctggaaatcggtgaaaggcgtaagcttgggcacagcctgcgcgaacgtcgctacgatcgcgctttcgtgctgcccaactcgtttaaatcggccctcgtgccgttctttgcgggaataccgcatcgcacaggctggctcggcgagatgcgctacggcctgctgaacgatgcccgtaagctggataaagacgcctggccgctgatggtcgaacgctacgtcggtctcgcatacgataaaggcgtgatgcgctgcgcgaaagatctgccgcagccgctgctctggccgcagctgcaggtgcatgaaggcgaaaaatcgcaggcctgcagcgcgtttaatctctcagccgagcgcccgattatcggcttctgccccggcgcagagttcggcccggcaaaacgctggccgcactatcactacgccgagctggcgaaacagctgatcgacgaaggctttcagatcgtactgtttggctccgcgaaagaccacgaagcgggcaatgaaatcctcgccgcgctcacgaccgaacagcaggcatggtgccgcaatctggccggcgaaacccagcttgagcaggccgttattctgatcgccgcctgtaaagcggtagtcagcaacgattccggcctgatgcacgtcgccgcggcgctggaccgtccgctggtggcgctctacgggcccagcagcccggacttcactccaccgctgtcgcacaaagcgcgcgtgatccgcctgatcagcggctaccacaaagtgcgtaaaggcgacgccgccgaaggctatcatcagagtttgatcgacattacgccgcagcgcgtactggaagaattaaacgacctgctgctggaaaaaacggaacaagaggaagcctgacggatgcgggtactgatcgtaaaaacctcgtccatgggcgacgtgctgcacacgctgcccgcgctgagcgacgccgcgctggcctttcccggcattcgtttcgactgggtggttgaagaaggcttcgcgcagatcccttcctggcatgagagcgtcgaccgggtcatcccggtggcgattcgccgctggcgtaaggcgtggttttccgcgccgatcaaagccgagcgcaaggcgttccgcgaggccgtgcgcgcggaaaagtacgacgctatcatcgatgcccaggggctggtgaagagcgccgcgctggtcacccgactggcccgcggcgtgaagcacggtatggactggcagaccgcccgcgagccgctggcgagcctgttttacaaccggcgtcaccatatcgctaaacagcagcacgccgttgagcgcacccgcgagctgtttgcgaaaagcctcggctacgcgaagccggaaacccagggcgactacgcgatcgcccgccattttttgcgtcaggctgacccgtccgctgcgccgtatctggtgttccttcacgccacgacgcgcgatgataaacactggccggaagagaactggcgggcgcttatcgccctgcttgccgacagcggcatacgcatcaaactgccgtggggcgccccccatgaagaggcgcgggccggacgcctggcggaagggcacgattttgtcgacgtcctgccgcgcatgagcctggagcaggtagcccaggtgctggccggcgcgcgcggggtcgtttccgtcgacacggggctgagccacctcaccgccgcgctcgataaaccgaacttcacgctgtacggcccgaccgatccggggctaattggcggctatggtaaaaatcagcacgtggtgcgcccggaaagcggcagcagcacgggcgatattcccgcgtcccgggttcggcaactgttgaaatctcaggaactggcttaatgggttcattatttaagcagatctatcgctacacgcatcgacgcgcctttcgccataacgaaaatctctggccgtttacccatatcacgcgcgcggcgagcggcgaaatccgcaccctgaaatacaaagggaaagcggttccgctggtcaatctcagcgaactgaaggatagcgctcagggcgaggtgctgctgaccgccaccggcccctctacgcgccgcatcgattttacgctgctgccgaaaagtattccggtgatgggggtgaacggcgcctggcatctctctgataaaattaacttttcgctctataccatcgtggatatggagttttacgataaaaaaccggacgtgatccgttcggtgattagccaggctgacattgtgctcttcaccaccatgcacggtatcgccaaaatcctcgaccgccacggcgcagagcttcgctgtcgtttggcattaattgaagacgcctgttataaaatttatcagcctaaagtcgccaaaaacgcgatacagcaggcctggcgcggcgtccccgcgctacgctttcatccgcaaaggcaggatatttgctttagcaccgacattcgtcacggcattttcgatgccggaaccgtggtctactgggcactgcaaattctgatgtggctgggatttaaaaccattctgataagcgggctggatatgagtaatttcaaccagccgcgattctacgaaacggaacaggataaactcccctcctggctggcaaataaggtggatgacctggtcatgccgtccttttcgcacgctgccaacgtgctgcaacaaaaccatattcgggtcgtcaacttctcgttagaaagcgcggttccggaaacgattttcgaaaaggtttcttttgatgagtactttaaaaataagtaattacgccagacagggctacaccgttttcttcactttgtttctgttttttagcgctattttctgcgtatcaacccggacaaataacctccttcatttatctattttgctctttttgctttcactgcttaacaaagacaatcgtcaggcaatagcggaaagcatccgccagcggtggccggtttatagcctgctggtcgtattctgcgtgtactatgcgctgagcaatatttgggggcagacgccacagcatatcgattcccctctgacccacggcacctatttaattttctatcttctgctgctgacaacgctacttggccatccccggacccgacatctggcgctgctgagcgtcgtggccgggatcacagtgctctccgtctggacgatggcgatcgacttcacgctggtcctcaaggaacgcctggtttcgccggagaatcccggcccgaccaacgtgatcgacctggcgggctattgcggtatcggtatccttatttgcgcgatgctgctgaaggagaaaggcagccacctgctgtatgtgccgatggccatcatgctggtgatgctgtttctgacccaaagccgcggcccgattatcgcgctgctggtggcgtttgtttgcaccctgcacctgcacgtctttacccgccgcaaccttctgattgtcgccgcgttagcgttggttctgggcgcgcttttcttctttacgccaacgggagacctgctgctggcgcgctttgaagagctgggcacccaaagcggattgcgcttgagtatctggcaccatacggtccaggaagtggccagccagccgtggctgggtcggggctttgactacgagctgaactttaccaactacagcggcgagcatatcactaccacccacagcgtctatcttggcgcactgttgaaaggcggcataatcggcctggcgctgctgctggcggtgattgccggagggttatggcaggcatggcgcaaacagcaggatggccgctacgggctggcgatttttatctatgcgctgatttttatggcctcgcagggcatgtttatcatcagcaaccctcgcgaaagctggccgctgttttggctgccgctgggcatcgcgctgagcggcagcctgaaggcgaaacgctaagagaagggcccgcagcgggcccttttttatgcctgctggcgagcggcgatcagggcatccgcctgcgctttgatcgccggccagaccgcgtcaatggtcatgtcggcgacgttagtctcttcgcagacaatttgtctggccttgtcataacccggtgcccaaatggtatagcccggcaaaccggtatctttgagtttacgtttgttgtaaaccgccaccatgggcttgtcgaacgcgcgagcaatatgcacgatggcggtatccgccgtaatcaccagatcgcagtggcgaacaatctcaaccgctgaattaatattgctatctggcagatgcagcgccgtttccagattaagctgacgaattttctcgctatgcccgaccatcacgacgctgattttataagggagcgtatataagcgttcaatcagagcagaaacctgatgacggcaaaagtctttatccgttgaggcggtaaacgggtttatggcaatacagagctgactccccttgtgctgagccagcagtgttttgactctttcccgctcaaaagcatcaccgggcagatgatagtggtaatgagggtgttctatgccaaatagcctggcgacggctttatagcgcgcggaaatatggctgctgctatccagaaaagggatggagtgatcgtaaagcttatattcttgtttattaaaaccgataacgcagccagggcgtaaatcagccagcagtttaaaacgctcgtaggttttcacgtcatcaaaatcaacgaccgcgtcaaatcctgccgcacgcagtgcgtttaacggcatccgcggctgatataaataaacctgctcaagaaaatccgcaccggcaagcatctgcttacaaaccggcccggtaagaaccgaaaccttatagccccggtcagctaaaagctttgcgcagccggtcgttacgaccatatccccaactttgtcatccaggcgcaataataaaacatgctgaatcttcgcggaattaaagggctggcgtgcgcttttatttctgtaacgatagttaattaaattaaacttaatttcgcggaagaaggcatttttcttccgcgtaaactgcttcacgatacgcatacggtacctggttgtgatcttttatcgctgtgtgagtttctgttggtagtactccgccaacgtcattcccttcacctgcggcgccagccagctgaaaaaagcgtccagatcggcatataagcgctcgatatcctgctcgtttttaaacgttgggctgccgccgggcatgtactctgaagagtggagcatatattcgacgtagtcattaccctgagtcaatgtttgttcgaccacttttttcatcgtctcaacgttgccgcccatcggacgcagccagtgtaccgacggcgagcgtactttgccgcgcaggcgatcgtagccctgcttcaggctattcatccacgcggaatgcttgtactgaatgctcatcggcacttccagcagcgatgattgcccttcacgacggatatcattctcgtcaagaaaataggcgtgctgcgggaaatcacggtaatcggtaccgccgtcgccctgcggcgcgcctttcgccgtcttccagttcaccctcggggtaaccgagcaatccaccagatagccatactccaccagcagacgcgcgtagcgctcgtcaaacgcccagcgcccggcgcgatggctgaccattttggtctggaaggtatcctccagcagacgggtcatatagtcgacttttgcccgcatcgccgcatcgctgtactcgatcaaatacggtttatgtcgccagtcgtcatcggtgagcggatcggtcggcgggctgttccacgcgtggagatgcataccgatttccgcggttccccgggcgatcgcatctttggcaaattcgatataaaccgggtcgatggccatttcatagttggtcaaccagaccggtttaaaaccatacttttcgcaaagctgctgaaaacgcggtagatagcgcgcattctcggtggtgatgctgtcatgtttttgccagaggttatcaccctctgtatcaatcgtgatgagaaatgcgggtttgtgcacgaaaacgtcctcaggccatacgtatcgggtcatggtagagcaagacaaggcttctctcaatctatctgatcccctagaatcggagccctgcccctgaatgaagaatagagaatgacgcctgaaacccgcacttccggccgcgtgaacccggcgcgaatcctggttattaagcttcgccatcatggcgatatgttattgataacgccgcttattcacgcgcttaagcagcaatatcccgccgccagcgtggatgtgctgctttatgaagaaacccgggatatgctcgcagcgaatacggatatccgccacatttacggcattgaccggcgctggaaaaaacagggcgccggccatcagctgaagatggagtggcagctgattcgcacgctccgccagcagcgctacgatatggtgctcaatcttgccgatcagtggcccagcgcgatcatcaccaaactgaccggggcggccatccgtatcggctttgactttccgaagcgtcgccacccggcctggcgtttttgccataccgccctcgcctcaaccgagcggcataaccagctgcataccgtgcagcagaatctgtcgattctggcgccgcttgggctggatattgctgacgcgccggcgacgatgggctacagcgagcaggactggcgcgccagccgcgcgctgctgccggcaggatttcaggataactatatcgtcattcagccaacctcccgctggttctttaagtgctggcgcgaagggcggatgagcgccctgataaacgcgctttctgaagcaggctacccggtcgtgctgacctccggccctgacgccagagagaagcagatgatcgacaccattatggcgggctgccccaatgctcgcctgcactccctcgccgggctgctcaccctgcgccagctggcgtccgtcatcgaccatgcccgcctgtttatcggcgttgactccgtgccgatgcatatggccgccgcgctcggtacgccgctggtggcgctattcggcccctccaagctcaccttctggcgtccatggcaggcgcagggcgaggtgatttgggcgggtgatttcggatcgattcccgatcctgacgacattgataccaacaccaacgaacgctttctcgatttaatccccaccgacgcggttatcgcggcggcgaaaaaggtactggcatgagtaaattcaggctggctctggtacgccagaagtatcgcccggacggcggcgcggagcgctttgtctcccgcgcgctggaagccctcgacgacagcgatcttgaactgaacgtcatcacccgcgaatggcaggggccggtgaagcccgagtggaacatccacatctgcaatccgcgcaaatgggggcggatcagccgcgagcgaggatttgccgacgccgcccgccagctatggcagcgcgaagccttcgatctggtgcaaagccacgagcgtatccccggctgcgacctgtaccgcgccggagacggcgtgcaccgccgctggctgcagcagcgctcgcgcattttgcccggctggaaaagccgcctgctgtttgccgaccgctaccatcgctatgtgatgcaggccgagcgcgacatgtaccaggacgcgcacctgcgcggcgttatctgcaacgcggagatgattaaacgcgagattattgaagacttcggcctgccggcggaaaaaatccacgttatctataacgctatcgataaccagcgttttctgccgccgacggaagaagcctttgtcgcgctgcgcgccaaatggaatctgccgcgccaggcgacctgcctgatctacgtcggctccggctttgagcgcaaggggctggatgcggcgatccgcgccatcgcgccgaccaaccgctacctgctggtggtgggcaaagataaagagcagggccgctatcagcagctggcgaaaacgctgaactgcgaggagcgggtgcgcttcttcggcatgcaatcggaaaccctgccgttctatcagatggccgacggcctgctgctgccgacgctgtacgatccgtttcccaacgtcattctcgaagcgatggcctgcggcctgccggtgattacgactaccggctgcggcggcgcggagtttattgttcagggcagcaatggctacgtttgcgatgcgctggatatcccggccctgcaggagtcggttatcgccctgcccgcccgggcgttaggctctgcgcaaggcgaacgcgcccgcgagcgcatcatgacctgcaccagcgaacgtctctcggcgcagctgctctccctctatcaggatttggtgaaataacgatgcgcatactgtttgttatcgacggcctgcccggcggcggcgcggaaaaagtcgtgctgacgctggcagcgcattttctcagccagggtgaacaggtatcgcttttttccctgcgcgacgtctgcgattatccgctgccggaagggctggattatcaggtcatcgccgatcgctgccgcaagccgtggcgcaagctgacggagctgtcccggcgcgcgcgccagcttgatgcggcaatcgagaaagcagaacagcagggccgtttcgatctggtgctctcgaatctgcataaaaccgaccgcattgtctcccgcagccgcctgctgaacgggcgcaacgtctggttttgcctgcacggcgtgttctccgcgtcctatctcggacaccgcagcggttttgaccgctggctgaaacagcagaaaatcgggcgcgtttaccagggacgcaacgtcgtcgccgtctccgatgcggtaggtcaagacctggtcgagcagttcgctattcgcccggcccagctgaaaaccatctataacccgtttgatatccccgcgctgcgcgccgcggctgaagagcccagccagcgccccgacggcgactatattatccacgtgggccgctttcatcccggtaaacgccacgaccgcctgattgaggcgtatgcgcaaagcggtatcgatgcgccgctggtactgctggggcagggaaaaccggaacaagaacagcgcctgcgccagctggcgcagcagctacaggttgccgatcgcgtcctgtttaagggcttccagaaaaacccgctgccgtggattaaaggcgcgcggatgctggtcctcagctccgatagcgaaggctttggcaacgtggtggttgaggcgctgctgctggatacgccggtcgccagcacccgctgcccgggcggcgtgaccgagatcctcaccggcgagctgtcgcgtggcctggcggatctcaacagcccggcgctggctcagacgatgcaaagcatttaccatagcccgccggccatcgacgcagcggcgctggagaagttcagcgtggcatcgatttgtcagcagtatcgtcagctgcgcagcgcctgacgccgttattcaaccaggatcgaatgagttatgagtcaaacgcctttactaagcatcgtagccgccgtctataacggcgaaaaattccttgcgcaattctttgagtgccttgagcaacagcagctggaaagctatgaactgatcctggtgaacgacgggtcgacggacggtagccttgcggttatcgaccagtggaaagagcgcctgcaaaacgtgctcgtgctggagcaggaaaaccagggcgtgtcggtggcgcgcaataccggcctcgccgcggcgacgggtaagtacctgaccttcccggatatcgacgataagctttacccgggcatgtaccgtacgcttctggagatggcggaaaagggcaatctagacgtcgccacctgcaacggccgctacgtctacgagacgaaaaaagatatccatcctattttcccgctggaccggctacagtcgaccggcgttttgcccggccacgtctggttaaagcaggcgctggattctcgtaagttcctgcatgtcacctggctgaatatctaccgccgggagtttatcgccagccaccgcttccactttgagcctggcctgcgccatcaggatattccctggaccaccgaagtgctgctggcggcagagcgcgtgcagtacaccagcgagcagttctacgattactatattcactcggaatcggtgtcgcataagccggacaacgacgacacgctgatgcgttcagcgcgccactatatgaagattcttgagatgctggacgccatcaaccagcgttatccggacaaggttcgcgatatttccgcctgccgctggcagatcgccaaagaggggctgggaattattcataccttcgatagcatgaaagatgagtcaaaaaagcatattatcattaaagagttctttgaccgcggtatctggcgcctgatctggaaaaacgcccgtacgttccgtctacgctggcgtcttggacgccgctatctgcgcatcaagcgctatcgcgacgcggcttaatactgaatcccttagtttccgccaaagagatagctttacgcgggttaaatgcttagaatttgcccgcaaaaacataaatacggataaatcgcttggaattgctttataccgccctactttacctcattcagccgctggtgtggctgcgactgctgttacgcagccgtaaggcccctgcctatcgtaaacgctggaaggaacgttatggcttctgccagaacaaggtagaaccgggtggcatcctgctgcattccgtttccgtaggtgaaacgctggcggcgattccgctggtgcgcgcgctacgccaccgttacccctatctgccgatcaccgtcaccaccatgacgccaaccggctctgaacgcgccatgtccgctttcggcaaagacgtgcatcacgtctatctgccttacgatctgcccggcgcgatgaaccgtttcttcaataccgttcagccgaagctggttatcgtcatggaaaccgaactgtggccgaacatggtcgccacgctgcataagcgtaaaatcccgctggtaatcgccaacgcccgcctctccgaacgctcggcgaaaggctatgccaaactggggaaatttatgcgtcggctgctgagccgcattacccttatcgccgcgcagaatgaagaagacgccagccgctttatcgctcttggcctgaaacgcaatcagctggcggtcaccggcagcctgaagtttgatatttcggtcacgccagagctggcggctcgcgccatcaccctgcgccgccagtgggctccgcaccgccaggtatggattgccaccagcacccacgacggcgaagaacaaattattcttcaggcgcataagcagctgctggagcgtttccccaacctgctgctgatccttgtccctcgccatccggagcgcttcggcgacgcccgcgagatggtgcagaaagcgggaatgagctacaccctgcgcagcaccggcgaaatcccgtcgaacagtacccaggtggtgattggcgataccatgggcgagctgatgctgctgtacggcattgccgacctcgcgtttgtcggcggtagcctggtggagcgcggcggccataacccgctggagcccgccgcccatgcgataccggtactgatgggtccgcacacgttcaacttcaaagatatctgcgccaagctgcagcaggacgatggactgattaccgtcaccgacgccgactcgctggtaacgcaggtgtctaacctgctgaccgatgaagattaccgtctgtggtacggtcgccatgcggtggaagttctgcaccaaaaccagggcgcgctctcccgtctgctacagttattgcaaccctatctgccgcagcggagccactaatgtcgcctcgactctcggtcgtgatgatcgccaaaaacgcggcggatctgctgcctgattgtctggcgtcggtaagctgggccgatgagatagtgctgctggattccggcagcagcgacaacaccgtcgaactcgcccgcagccagggcgttcaggtgcatgtcaatcgcgactggcagggctacggtattcagcgccagcgcgcccaggcctacgccaccggcgactacgtgctgatgatcgataccgacgagcgcgtcactccggagcttgcgcagtctatccgcagcgtgctggccgcgccgcaaaccggcgcgatatacagcatcgcccggcgcaactatttccttggccgctttatgcgccacagcggctggtaccccgaccgcgtgatgcgcctgtacgaacgcgaccgttaccgctataacgataatctggtccacgaatctctcgacgcccagggcgcgcgggttatcgaactcgcgggcgacctgctgcatctgacctgccgtgatttctccggctttcagcaaaagcagctggcctacgccgccgcctgggcgcaggagcgccatcagagaggcaaaaagacctcgctggccgctatcttcggccatacgctgggcgcctttgtgaaaacgctgctgctgcgcgggggcattctggatgggaaacaaggttggctgctggcggtggtcaacgcgcaatacacgtttaataaatacaccgagctgtgggccctgagccgcggctactcggagaaagtgtgattatgagcacaaaagcgatctatccgggaaccttcgaccctatcaccaacggccatatcgatatcgtcacccgcgcggccagcatgttcgataaggtgctgctggctatcgccgccagcccgagcaaaaagccgatgttcactctcgacgaacgcatcgcgctggccacccaggcaacggcgcatctggtcaacgttgaggttattggcttcagcgatttaatggccaattttgcccgcgcgcagcaggcgaatattttaattcgcggcctgcgggcggtggcggattttgaatatgagatgcagctggcgcatatgaaccgtcatttgatgccgacgctggagagcgtgtttctgatgccgtgcaaagagtggtcgtttatctcctcttcgctggtgaaagaagtggcgcgccaccagggcgacgtatctcactttctgccggcaaacgttcaccaggcgctgctgaagaagctgtaatcctgcgccatcggggctcttcccggaggcgatgctgcgcatctgtccgggctaccggaccaagcacagccctgtagcccggctaagcgcagcgcaagccgggttcaccgcagccaccgcatattacttctggcactggcgacaataaaacgtcgcccgctgggcgtgtttactgccgataaccggcgtcccgcaaatgcggcacggctcgcccttgcggccatacacctgcagctcctgggcaaagtagcccggtttaccgtcgctttgcaggaaatctttcagcgtcgtcccgccctgttcgatggatcgcagcaggaccagcttaatcactttcaccagctgctcgcactcctcgcgcgacagcgaagaagccagcctgtcggggtgaatacccgccgaaaagagcgattcgctggcgtagatattgcccaccccgaccaccagcttattatccattagccagggcttaatcgcggtttttttcttcgcgcacttcgcctgcagataatcggcgttgaactcatcgctcagcggctccggccccagatgcgccagcaccggatgcccttccagcgctttggtccacagccaggcgccaaaacgacgcgggtcggtatagcgcagcaccttgccgttactcatcaccaggtccacgtgatcgtgtttttccgcgggcagctcttcgctcaggatacgcaggcttcccgacatcccaaggtggacgataatccagccgtcgggcagttccagcagcagatatttagcgcggcggcgtacgctgagcaccggaacgtcgctcagacgatagatctcttcggagaccggccaacgcaggcgcccgttgcgcacaacggcgtgcaggatggtggctcccaccaggtgcggctcaatgccgcggcggctggtttctacttcaggtaattcaggcattcttttctcgaacaaaaacggcaggatgcactatcttaccgcgttcagcgacgaggttcagggcaattattgttcagcatgctcttccgcctggcgcagggggtaaacgttcgccagcgccaacggtgtagacggtagcgtagtcttgataacaaaaaaccccgccgaggcggggtttttctttacaaggaatctaaaattatttgattttagcttctttgtataaaacgtgctgacggacaactggatcgaactttttcagttccagtttttccggcttagtacgtttgttcttcgtggtggtatagaagtgaccagtaccagcagaagaaaccagcttgattttctcacgaatacctttagccatgacttatttcctctaagtacttagtacttttcgccacgggcacgcagttcggacagaactgtatcgatgcctttcttatcaataacacgcatacctttagcagatacgcgcagggtgacaaaacgcttctcgctctcaacccagaaacggtgagagtgcaggttcggcaggaaacggcgtttagtcgcgttcagtgcgtgggaacggttgttaccggtcaccggacgcttgccagtaacttggcagactcgggacatgtctattctccaaaaatcaaattagctcgagcttcgtatggggtattggcgcctcgtcaggctttacagcccggtcatcgcagttctaagcgaactctcgattgccaggcccaaatgccaaacccgagattctcaaaggtggcgtagtatacgctgactcggcgatgtgctcaagtcccgaacagacaaagatcccgatggatcgcgcgatcggggctaaatccagccgcgttcagcaaaagatacgtacgctccgcggccaataacaaggtgatccagcacacgtatatccatgaatcgacaacattttatcactctttcggtaatcaacctgtcggccttgctcggctcaggactaccggatggatgattatgtgccaggatcaccgcggcggcgttcactttgatggcttcgcgtacgatttctcgcggatgcacctcaacgtggctaagagtaccagaaaaaaggcggctatgtttcaatacccggttctgattatctaaaaagatcaccatgaagatctcacgctcttcgtcggccagctggctttgcagaaattcccgcgtcatcgacggggtaaccagcgagggttcttccgtcattcgcaggctaaaatagcgtcgcgccagttcagcaatcccttttagctgcgcatatttcgccagaccaatgccttccacctcagcaaactgcgactcttccgccgatagcaggccgtacagcgagccaaaacgctgtagcagctcccgcgaaaatgtcatcacgtcctgcgtgcgggtaccggtacgtaaaaatagcgccaacagctcaatatccgacaaaacttcgataccgtagcgctgcatcttttccctcggcatgagggattcttgtatttccatcgcggcatctccttcccactgcgcgctatcctggcacagcctttttgcgccgccgagatgcaagttttatccctgcgtagcgcctcgcaaagtgtatctccgcgaggcacacgatgccgtcaggattgtgataagatgcgcgaattctggtgtaccgcaacaggaaaaaatcatgatgagtctggctggtaaaaagatcgttcttggcgtgagcggcggcattgctgcctataaaacgccggaactggtgcgccgcctgcgtgaccgcggcgcggatgtccgcgtcgccatgacggaagccgcaaaagccttcattacgccattaagtctacaggcggtatccggttatccggtttccgacagcctgctcgacccggccgccgaagcggcgatgggccatattgagctggggaaatgggccgacctggtcattcttgcccccgccaccgccgacctaatcgctcgcgtcgcggcagggatggccaacgatctcgtttcgacgatttgtctcgctacgccgtcgccggtcgccgtcgtgcccgccatgaatcagcagatgtatcgcgccgccgccactcagcataatctggacgtcattgccgcccgcggtctgctggtctggggcccggacagcggcagccaggcctgcggcgatgttggcccggggcggatgctggacccgctgaccattgtggatatggccgcgcagcatttctcgcctgtcaaagatttgcaacatctgaacatcatgattaccgcgggccccacccgcgagccgctggatccggtgcgttatatcaccaatcacagttctggtaagatgggcttcgcgattgccgccgccgccgcgcgccgcggggcgaacgtcacgctggtgagcggcccggtttcgctgcctacgccgccgtttgtacacagaattgatgtcaccaccgcgctggaaatggaagccgcggtgcaaaacagcgcgcctcagcagcatatttttattggttgtgcggcggtcgctgactaccgtgcggtcgccatcgccgaagaaaaaatcaaaaaacaaggtgatgaattaaccctgaaaatggttaaaaatccggatatcgtcgcaggggtcgccgcgcttaaggccaaccgcccttacgtcgttgggtttgccgccgaaacaaataatgtggaagaatacgcacggcaaaagcgagcccgcaaaaatcttgatctgatttgcgccaatgatgtttctcagccaaatcagggatttaacagcgacagcaatgcattacaccttttctggcaggagggagataagcgcttaccacttgagcgcaaggaactcctgggccaattattactcgacgagatcgttacccgttatgatgaaaaaaatcgacgttaagattctggacccgcgtgttggtcagcaatttccgctgccgacctatgccacctccggctccgccggacttgacctgcgagcctgtctcgatgacgccgtagagctggctcctggcgcaacgaccctcgtgccaaccggcctggcgattcatattgccgatccctctctggcggcggtgattctgccgcgctccggactgggccataagcacggcgtcgtactgggtaacctggtcggtctgattgattctgactatcagggccagctgatggtttccgtctggaaccgcagccagcagagcttcagcatcgaacccggcgagcgtatcgcgcaaatggtgtttgtgcccgttgtgcaggcagaatttaacctggtggaagattttgacgccaccgatcgcggcgaaggcggcttcggtcactcagggcgtcaataagcccggcgatagacaaaactctttcggggcgctgccggcaaaagggctgcctgaaggatgaagtggaaccagcatcgcaaagcgcactaatgcaataacatcaccgcaggcaacagcttgcggtcgctttgtgggtgcctgcctgacaagtgctttttttcaggggtattttaaaacatggcagaaaaacaaactgcgaaaaggaatcgtcgcgaagaaatacttcaatctctggcgctaatgcttgaatccagcgatggaagtcagcgcattaccacagcgaaactggcggcgtccgttggcgtatccgaagcggctctgtatcggcacttcccgagcaagacccgcatgtttgacagcctgattgaatttatcgaagacagcctgattacgcgcatcaatttgattttaaaagatgaaaaagacacctcagcgcgcctgcgtctgattgtgctgttgattcttgggtttggcgagcgtaatcctgggctgacaagaattctgaccggccatgcgctgatgtttgaacaggaccggcttcaggaccgcatcaatcagctgttcgagcgcattgaagttcagctgcgtcaggtgttgcgtgaaaagaaaatgcgcgaaggcgaaggctataccgtcgatgaagccctgctggccagccagctgttggcattctgcgaagggatgctatcgcgctttgtgcgcagcgagtttaaatatcgcccgacggacgattttgacgcccgctggccgctggtcgccgcccagctgaaataattctcgccggtctctgtgcagcccgaagggctgcatctcttcccgcaggaattcccggcattatccgcattgatacccaggcgctcttctcgccgcggctggccgttttgccagcaatcgacccgacagaccgttgcccgccgggcagatgtttatacgccgtacgcttcgcgataggcgcgaacggcagtcaggtgttcagccatttccggcttctcttccagatagctaatcaggtctttcagcgtcacgatggaaattactttacagccgtagtcgcgctcaacttcctgaatcgcggagatttcgccgcgtccgcgttcctgacgatccagagagatcagtacgccggccagctcagcgccgttggcctgaataatttccatcgattcccgaatcgcggtgcctgcggtaataacatcatccaccagcatgacgcggccctgcagcgcgctccccaccagatttccaccctcgccgtgggtctttgcctctttgcggttaaagcagtaaggcagatcgcggtcatgatgttccgccagcgcgaccgccgtggtcgtggcgatagggatgcctttataggccgggccaaacagcaggtcaaaatcaatcccggaatccaccagcgcttcggcataaaaacggcctaacagtgccagatcgcgcccggtattaaacaggccggcgttgaagaaatagggactcttgcgcccggatttcagcgtaaactcgccaaacttaagtacctgcttgttaagcgcaaactcaataaactggcgctgatacggtttcatggattcgctcctcatcttacttttctacggacaaaaaaaaggcgacttctcagtcgccttaaaaactagttttgcaacgccgctttctgcgtcgtgacaatagattcgatacccccccgggccaatgccagcagggtgaggagttcttcatgggtgaacggctcgccttccgccgtaccctgcacctcaatgatgcggccatcttcggtcatcaccacgttcatatcggtttccgccgcggaatcttcaacgtattccagatcgcaaatcgcttcgccattcacgatgcccacggagaccgccgccaccattcctttcatcgggttggttttcagcttaccggccgcgaccagcttattcagcgcatcggccagcgccacgcaggctccggtgatagacgcggtacgggtgccgccgtctgcctgcagcacatcgcagtccagagtgatggtgaactcacccagcgctttcaggtcaaccgccgcgcgcagcgcacgcgcgatcaggcgctggatttccatggtgcgtccgccctgcttaccttttgcggcttcacgcgcgttacgcgtatgggtagaacgcggcagcatgccgtattcggcggtgatccacccctggccctggcctttcagaaagcgcggcacgccttcatcaatagaagcggtgcacaatactttcgtgtcaccaaattcgaccagcacggagccttctgcgtgttttgtgtagttacgggtcagggttactgggcgcacttgattagcgctacggcctgctggacgcatgatgttctccggcttgaaacgaatgtggctgcgcattatacggataatgcgcgcttattcctatcctgataaggcctcgaaagctataatccaccccactctcctttaaaaacaggaacgtctatgatccgcagtatgaccgcctacgcccggcgtgaaatcaagggtgaatggggtagcgccgcgtgggaactgcgctcggtaaaccaacgatatctggaaacctacttccgcctgccggagcagttccgtagcctggagcccgtggtgcgtgaacgtattcgctcccgtctgacccgcggtaaagtcgaatgtaccctgcgttttgagcaggacccgagcgcgcagggtgagctgatccttaacgaaaaactggcaaagcagctggttaacgccgccaactgggtcaaaatgcagagcgacgaaggcgaaatcaatccggtagatattctgcgctggcctggcgtgatgtcggcccatgaacaggatctggacgccattgccgccgaaattctgggcgcgttaaacggtgcgctggatgactttatcatcgcccgcgaaaccgaaggacaggcgctgaaagcgctgatcgaacagcgtctcgacggcgtgacggccgaggtggctaaagtacgtgcccatatgccggaaattttgcagtggcagcgcgaacgtctggttgccaagctggaagatgcggaagtgcagctggaaaacaaccgcctcgagcaggagctggtgctgatggcgcagcgtatagacgtcgccgaagagctggatcgtctggaagcgcacgtgaaagagacgtggaatatcctgaagaagaaagaagcggtcggtcgtcgcctcgactttatgatgcaggagttcaaccgcgagtcgaacaccctggcgtctaaatcaatcaatgccgaagtgacgaactccgccattgagctgaaagtgctgatcgaacaaatgcgcgagcagatccagaacatagagtaacggtttttcgctcgccaacccacgcacggacaaaaggccatggtaaatcatggccttttattttcgctgcgtttcagaaggcgtagttcttatccaatatccggcaggttaaaaatgcccctgcggcgcacagcagcgtgggggccagatagctgtgatccatgtgggtgaactccatcaccagcgcgaccgccgtgagcggcatctgcatggatgcagcgagaaacgccgccgcgccgacgagagcaaaactgccgtaatctccgccgggaagcagctgttgccagagcatacacagcagcaggctggtcaggccgccgaccgccagccccggcgtcagcaggccgccctccgcgccgccgcgcagcaccgccagaatcaccaccattttcagcgccagcagcatcgccgccccggggaaacccaggtcatcgctgagagccagctgcataggccctttaccgtttcccggaagctgggggaaatagaggctgaggacggcaagcagggaaaacgccagcagacagaaaaccggcatctgccagttgcttcgaacgcccgagcgggccgtgctggtcgctttgcgaaagagccaggccccggcgccaagaatggggccggcgatgatcgcccaccagagaaatgaatgcggcaggatgtcggaagtaaaatggtattgcgattcctcgcctaacccgagcgttgccgtccacgcggcaatcgccgaggtgataatcgccgccagcgttttttcccagctaaacgacagcagcattacctcaaggctgaataacgcaccggccagcggaacgttatacaccgccgccaggcccgcaccggcgccgcaggcaaccagcgttcgggtttcatccgccatcagtcccagcttacgcgccaccatccctgcccccagcgcgcccatttcccgcggagccacctcgcggccaagcggagagcccagcgccacggtgacgatctgcaacagggcatgaatcgttgtggtacccgcaggcattgccaccgaaggattcgccaccgctgacgctattgagactcgcttctgcccatagcgtccaaggagccaccagccgaatcctgcgatggctccccccgcgacgattgccgagaagcgacgaggccaggatgaatccgtgacgccctgtagaaatgactccgcgctcatgatctgcccggggctgtagccaaaggccaggtgctgaatcgcatgtaaaatcagcgccagaaccatgcctgagaggccggcaagcagccccgtcagcacaacggcaatcaggcgggtgagatagtttttattgccagctgctgcagtcattttctcaggccctgaaggaggaaaataaaaggataaaggtcgagagttaaacaacaggtattcatcgcgttttcaatatcgatacgcatcgacggctttcacattactttttataatcactaaaaatgaataaatgacaaatgaaccgttaaattcagccgatttaaaccgatcgtgcattagtttaatcaggttaaattcattcactttagaaaatctcaatcgtgatcttgcgcacaaatcgttaaccttccgccatcaccgtgggggatttatgctgcttcatattctttatctgattgggattacggcggaagccatgaccggcgcgctggctgccgggcgccgccgtatggatacgtttggcgtcattatcattgccaccgcgacggccctcggaggcggttcagtgcgcgatattctgctcggccactatcctctgggctgggtgcagcaccccgagtacgtcattattgtcgccattgctgcggtcctgaccacgattgccgcgccagtgatgccgcatctgcgccgtctgtttctggtgcttgatgcgctcggcctgatcgtgttctctatcattggcgcccagatcgcgctggatatgggccagggcccggtcatcgcctccattgccgccgtgatcaccggcgtctttggcggcgtgctgcgcgatatgttctgcaagcgtatcccgctggtgttccagaaagagctttacgccggggtgtcattcgccgccgcgattttatacatcgcgcttcagcattacgtcagcaaccacgatgtggtggtgatctccaccctgctgttcggctttaccgcccgcatgctggcgctgcgctggaagctgggcctgccggtatttaactacaaccatagcgcacattaatgctttcagaatcccggaacgcgttgcccgcttagccacttcgccagtgcggcaacatccgggtgatgtaagaacgtcaccagctgccgcgctctttccgccccgatccccggcaggcgccgccactgctcttcgtttcgctcctgcatccgttgccagtcatcctccttcagccgggcaaacgccgtcttcggtatagggactcccatcgcctggatccagcgcagaaaaggccgttcgcgcgcaagattgaactggtgccacagcctctgcccgcgctgcgttgagacccccggtatagcttgcagccgctccggcgtaaacgccaaccatgaaaagagatgctccatgctgcgcgcgtcatgcagggaccgccatagtgcttctcccacgccgtcaatatcaagaaccgatcgggatgagagccagaccagccgcgaaagaaactgttccgcacactcgggcgtggcaaaatagcaggttaaggcattgaaacgcgccgccggtggctggggtttattacgctgagccgtgcgccagacgaccgaatcgatgcgcggtatcccctgcccggcaaggctgatttgcagctggtcgccaataccgatatccagattgtaccagcgggataccgaaccgacgctcacccgctgcacgcgcttatcgtccagcatctgcggctccagatgcgccaccacggctattttaccgctgcgcccaatgctaaagctgatacggcgaacctccatgacgcgtgaggcgggcgggtatttccaggcgatgacccaatcgccctgacccggaacccagaagcgtccgggagatgctttttcccgccgcactacgacgccatcgctggcaaaaggcagcggtgaagtgaaccagcgctggcgccactgttgaacctgctgcgcatccgcgacagggtgcgaaaaaagcgcgctgtaaagaaagccgccctgccgcagcagcgccagccgctgtttcatatcctgcggcccatcgggccatgcccagataaagagacccagctgattaagatccgccgcagcctgctggcgcatcatcatgccggcaacttttgcccgcgcgttcatgccgcccatctgtttttgcacgtgcccctcgcggagcaggaacagctcaccctgtagaacgctattcgccagtacgccgtcagagactttaggcacggaggggatctgcaagaccctggccgtccagtcttccccggccaggccattaccccggcttatcgcctgggtcagacgcccctgccgatacacgagcgtgaccgcgacgccatcgactttaggctgtacccacaggccggattgaccgcgcatccagcgcgccacgtcggcttgatttgccagtttacgcacgccggtgtgcgccaccggatgtctggcctccccttttaggggaggagacgcatcgtgagcgggagcctcgccggtgaagcagcgccgccaataagccagccgctccgcaagctgatcatagacctcatcgcttaccgtactgctcccctgctgccagtaggcgtttttccattccgttatctgctggctgagacgttcaatctcccgatcggccctggcctgcggccacgcggggcaggctgcctgcccgtatcccaccagcatccacagcaccagcgcccagactcctttttgcatcgcgatgccctcctgttttctcgtcggcaattgtgccgcaggcttattttcatcggcgagaggggatttttaacgctgcgagcatgcttccggcttttctgcgttgtttctgcaacgcacggagaaatcaggaaaacagcaagcaaaatgaaagaaagaacgcaaaaagtgtgacagggactgcgtcacgctgcgccgccgtgtataataggctcgtatgtaagctctatttcgaccaccacatacaaaagacactcatggctcaaggcacgctttatattgtttccgcccctagcggcgcgggtaaatccagcctgattcaggctttattaaaaacccaaccgttatacgactctcaggtttctgtttcgcataccacgcgcgctccgcgcccgggtgaagtgcacggtgaacactatttctttgtgaatcacgacgaattcaggacgatgattggcgaagacgcttttcttgaacatgcagaagtctttggcaactattacggcacctcgcgcgaagctatcgagcaggtactggcgaccggcgtcgacgtcttccttgatatcgactggcagggcgcgcagcaaatccgcaacagaatgcccggcgcgcgcagcatttttatcctgccgccgtcaaaagatgagcttgatcgtcgcctgcgcggccgcggtcaggacagcgaagaggttatcgcaaaacgtatggcgcaggcagttgcagaaatgagccattacgcggagtatgattacctgattgtgaatgatgattttgataccgcgctgagcgatctgaaaattattattcgcgccgaacgtctgcgcatgagccgccaaaagcagcgacatggcgctttaatcaccaaactgttggcagactgaacccacattcagtatcatgcccagtcatttcttcacctgtggagcattttaagtatggcacgcgtaactgttcaggacgctgtagagaaaattggtaaccgttttgacctggtactggtcgccgcgcgtcgcgctcgtcagatgcaggtaggcggaaaggatccgctggtaccggaagaaaacgataaaactaccgttatcgcactgcgcgaaatcgaagaaggtctgatcaacaacaagatcctcgacgttcgtgagcgccaggaacagcaagagcaggaagccgctgaattacaagccgttaccgctattgctgaaggtcgtcgttaatcacactgcgggtcgcccttgtatctgtttgaaagcctgaatcagctgattcaaaactacctgcccgaagagcaaattaaacgtcttcggcaggcttatctcgttgcacgtgacgctcacgagggccagacacgttcaagcggtgaaccctatatcacgcacccggtagcggtagcctgtatcctggccgagatgaaactcgaccatgaaacgctgatggccgctctgctgcacgacgtgatagaagatacccccgccacctaccaggacatggagcagcttttcggtaaaagcgttgctgaactggtagagggggtgtcaaaacttgataagcttaagtttcgcgacaagaaagaggcccaggctgaaaactttcgcaaaatgattatggcgatggtgcaggatatccgcgtcatccttatcaagctcgctgaccgcacccataacatgcgcacgctgggctcattgcgcccggataagcgccgccgcatcgcccgcgaaacgctggaaatctacagccctctggcgcaccgtttaggtatccatcacatcaaaaccgagctcgaagagctgggctttgaggcgctgtatcctaaccgctaccgcgtcattaaagaggtggttaaagcggcgcgcggcaaccgtaaagagatgattcaaaagatcctctccgaaatcgaagggcgcctgcaggaagcgggaattccctgtcgcgttagcggtcgcgaaaagcatttgtactccatctactgcaagatggtgctcaaagagcagcgctttcactcgattatggatatctacgctttccgcgtgattgtccatgattccgacacctgctatcgcgtgcttggccagatgcacagcctttataagccgcgtccgggtcgcgtcaaagactatattgccattccaaaggcgaacggctatcaatctttgcacacctcgatgatcggcccgcacggcgtcccggttgaggtacaaattcgtaccgaagacatggaccagatggcggaaatgggggtggcggcgcactgggcttataaagagcacggcggcgagagcagcaccacggcgcaaatccgcgcccagcgctggatgcagagcctgctggagctccagcagagcgccggtagttcatttgaatttattgagagcgtgaaatccgatctgttcccggatgagatttacgttttcaccccggaagggcgcattgtcgaactgcccgccggcgcgacgccggtggatttcgcctacgcggtgcataccgacatcggccatgcctgcgtcggcgcccgcgtcgaccgccagccgtatccgctgtcgcagtcgctctccagcggccagacggtggaaatcatcaccgcgccgggcgcacgtccgaacgccgcatggctgaactttgtcgtcagctcgaaagcgcgcgccaaaattcgccagctgctgaaaaatcttaagcgcgacgactccgtaagcctcgggcgccgcctgctcaatcacgccctcggcggtagccgcaagctggccgagatcccgcgagagaacattcagcgtgaacttgagcgcatgaagctgaccacgcttgacgatctgctggccgaaatcggcctcggcaacgccatgagcgtcgtggtagcaaaaaacctgcagcagggtgaaaccaccgccgtgcctgtacagccagcgcctgtcggccataatcatctgccgattaaaggcgcggatggcgtgctgatcaccttcgccaaatgctgccgcccgatccccggcgacccgattatcgcgcacgtcagcccgggcaaaggcctggttattcaccatgagtcctgtcgtaacattcgcggctatcagaaagagccggagaaatttatggcggtcgagtgggacaaagagacagcgcaggaatttatcaccgaaatcaaggtggatatgttcaaccatcagggtgccctggcaaatcttaccgcggcgatcaacaccgcttcttccaatattcaaagcctgaatacggaagagaaagatggccgcgtttacagcgcctttattcgccttaccgcgcgcgaccgcgtgcatctggcgaatatcatgcgcaaaattcgcgtcatgccggatgtaataaaagtcacccgtaaccgaaactagctcttccacaaaatcattcgaattgcgtcaaggcggcaagcgaatgacaaatctgccgggagcagatttgaacgctgcttacagcggccccgtaaagggcaaggcccaggaatgggccgcgtaatccgcagcgattaaagagtcattcgaaggatggaagtatcatgaatttacagcgttatgcgcgtatctgcgagatgctcgccaggcgccagcctgacctgacagtctgcatggagcaggtccataagcctcataacgtctctgcggtcattcgtaccgcagacgccgttggcgtgcatgaagtgcacgccatctggccaggtagccgtatgcgtaccatggcctccgcggccgccggcagcaatagctgggtgcaggtcaaaacccaccgtactattggcgaggctgtcacgcatttaaaaggccagggcatgcagatcctggcgacccatctctctgataacgccgtcgatttccgtgaaatcgactatacccgtcccacctgtatcctgatggggcaggagaaaaccggcattacgcaggaagcgttagacctggcggaccaggacatcatcattccgatgattggcatggtgcagtcgctgaacgtttccgtcgcctcagcgcttatcctctacgaagcccagcgccagcggcagaatgccggcatgtaccggcgcgagaacagtatgctgccggaagaagaccagcagcgcctgctgtttgaaggcggctatccggtgctggcgaaggtcgctaaacgcaagggactcccctacccccacgtcaacgagcagggcgaagtcgaagccgatgccgcgtggtgggccaccatgcaggcggcgaagtaatcatgcagggccgtctgctggatgcggtgccgctcaattccctgacgggcgttggcgcggcccagagcagtaagctggcaaaaatcggcctgcatacggtacaggatctgcttctgcacctgccgctacgctacgaagaccgcacccatctgtatcatatcggcgaactgctgcccggcgtttacgccaccgttgaaggcgaagtcctcaactgcaacatcactttcggcggccgccggatgatgacctgccagataagcgacggctccggcatcctcaccatgcgcttttttaacttcagcgcggcgatgaaaaatagcctggcaatcgggcgccgcgtgctggcctacggtgaggcgaagcgcggtaagcacggggcggagatgatccatccggaatatcgggttcagggcgacatgagtacccctgatttacaggaaacgctgaccccggtatatcccaccaccgaaggcatcaagcaggctacgctgcgtaagctcaccgaccaggcgctggagctgcttgaaacctgcgcgatcgccgaactgctgccgcctgagctggcgcaagggatgatgagcctgccggacgccttgcgcacgctgcatcgcccgccgccctctttacagcttagcgagctggaaagcggcaaacatccggctcagcggcgcttaatcctggaagagctgctggcgcataacctcagcatgctggcgctgcgggcaggcgcccagcgctaccacgccctcgcgctcagcgctaacgacacgctaaaagataagctgctggcctccctcccctttacgccgaccggcgcgcaggcgcgcgtcacggctgaaatcgagcgcgatatggcgctggacgtgccgatgatgcgtctggtgcagggggacgtgggctccggtaaaaccctggtcgccgcgcttgccgccctgcgcgccatcgcccacggcaaacaggtggcgctgatggcgccgaccgagctgctggctgaacagcacgccaataacttccgcagctggttcgaaccgctgggcgttgaggtgggctggctggctggcaaacaaaaaggcaaagcgcgcctggcgcagcaggaggctatcgccagcggacaggtacagatgattgtcggcacccacgccatctttcaggagcaggtccagtttaacggcctcgcgttggtgattatcgacgagcagcaccgttttggcgtccatcagcggctggcgctgtgggagaaagggcaacagcagggatttcacccgcaccagctgattatgaccgccacgccgattccgcgtaccctggcgatgaccgcatatgccgacctcgacacctcggtcatcgatgaactgccgccgggccgaacgccggttacgacggtggccattccggatacgcgacgcagcgatattattgaccgcgtacgtcacgcctgcactcacgaaggtcgccaggcctactgggtttgtacgctgattgaagagtcggatctgctggaagctcaggcggcggaagccacctgggaagagctgaagctcgccctgccggagctgaatatcggcctggtgcacgggcgtatgaaatccgccgagaagcaggcggtaatgagcgcgttcaagcagggcgagctgcatctgctggtcgccaccacggtgattgaagtcggcgtggacgtgcccaactccagcctgatgatcatcgaaaacccggagcgtctggggctggcgcagctgcaccagctccgagggcgcgtcgggcgcggtgcggtagcctcccactgcgtgctgctctataaatcgccgctgtcaaaaaccgcccagaagcgcctgcaggttctgcgcgatagcaatgacggtttcgtcatcgcccaaaaagacctggaaattcgcggtcccggcgagctgctcggcacccgtcagaccggcaacgctgaatttaaagtcgcggacttattgcgcgatcaggccatgatcccggaagttcagcgcatcgcccgccatattcacgaacgctatccccagcaggcacaggcgctgatagagcgctggatgccggaaaccgaacgctattccaacgcgtagcgcgaacatcatctcgccacgctgcgcataatttttattcagatgagtggattatgaaacgagaactggccatcgaattttcgcgcgtcaccgaagccgccgcgctggcaggctacaaatggttaggccgcggtgataaaaataccgccgacggcgccgccgtcaacgccatgcgcattatgctcaacctgatcaacatcgacggcactatcgtgattggcgaaggcgaaatcgacgaagcgccgatgctgtacattggcgagcgcgtcggtaccggccacggcgatgcggtagatatcgccgtcgatcccatcgaaggcacccgcatgacggcgatgggccaggcgaacgcgctggcggtcatggcggtaggcgataagggctgtttcctgaatgcgccggatatgtacatggaaaagctgattgtcggcccgggagcgaagggcaccatcgatctgaacctgccgctggcggagaacctgcataatatcgcccgcgcgctgaataagccgctgagtgaattaacggtcaccatcttagccaagccacgccatgacgacgtcattgttgagctgcaaaagctgggcgtgcgcgtgttcgccatccccgacggcgacgttgccgcctctattctgacctgtatgccggacagcgaagttgacgtcatgtacggtatcggcggcgcgccggaaggcgtcgtttccgctgcggtgatccgcgcgctggacggcgatatgaacggccgtctgctggcgcgtcaccacgtgaagggcgacagcgaagagaaccgccgcatcggcgaaaacgagctggcacgctgtcaggcgatgggcattgaagcaggcaaagtgctgcgcctggacgatatggcgcgcagcgacaacgtggttttctcggcaaccggcatcaccaagggcgatctgctggacggtatcacccgtaaaggcaatatggccaccaccgaaaccctgctgatccgcggtaaatcccgcactatccgccgtattcaatcgattcattatctcgatcgcaaagacccggatattcagctgcacatcctgtaaaaacatttgatcaatagagctttccagccttttcgggctggaaatctgctctcgtcgcggtgaagatacgttaacaggattgagaggagagtcgctatggcaaactgggttacgggcaaagtggtaaaagtacagaactggactgatgcactgtttagcctcaccgttcacgcgccggttgcgcccttcaccgctgggcagtttgccaaactggggctggacgtagacggagaacgcgtgcagcgcgcctattcctacgtcaacgcccccagcaaccccgatcttgagttctatctggtgacggttccggagggcaagctcagcccgcggctggcggctctgaagccgggcgatgaagtccaggtagtcagcgaagccgccggtttcttcgtgctggaagaggtgccggattgcgacacgctatggatgctcgccaccggcacagcgattggcccgtacctgtcaattctggaagaagggaaggacctggatcgctttaaaaacctggtactggtgcacgccgcgcgctatgccgccgacctcagctatctgccgcagatgcaggcgctggaagcgcgctatgcgggcaaactgcgcatccagtcggtcgtgagccgggaaaccgcgccgggcatgctcacgggacgtatcccgttcctgattgaaaccggcgcgctggaagaggccgtcggcctgccgatgaacgccgagagcagccacgtcatgctgtgcggtaacccgcagatggtgcgcgacacccagcagctgctgaaagagacccggcagatgagcaagcacctgcgtcgccggccgggtcatatgaccgccgaacactactggtaatcaggattccgctttccagcgcacgtccagcgtctctttaccaaacttattcgcgccctgggtaccgacaaacgcgcccaggtcgatcagcatcatgacgataatcagcgtcggtataaaccgcccgacgccccactgccagaccccaggcagcatcgaccagttgcccgccagcagcatccacgccagaatcatcagcagcgcccagagcccggatttaccccgatcgtgcaggcgtttaatggtcaccgccgccgtcggccacagcaggcacaccagaataaaagccgccgtctgtaaattgagaaggttactaccggccagcgtgaacagcgcgctcatggtcattatccagatagcgatccagatccagaagtcgcgacgtccaatccgccctttaattgagaatagccactgctgtagggtcatgttttattccttatcatcatcaccgacgtagtttaccctgaaggcgtgactttttgacaagcgtgacggttctcgttttaatcgtcagcagataaaaaaagggaagatgggcatgaagaagtgggcaaccttatgtttaattgggctggcggcattatccgtcggccaaaaagcgttgtccgccgagtcagacgccagcgctacggcgccctatcttctctccggcgcgccggcctttgatatttccatcagcgagtttcgggaaaaattcaacaacgataacccgaagctatcgctcaatgaatttcgcgccgtcgccgccagcaaagaccaggcaaacctgacccgcgccgccacgaagatcaatgagaacctttacgcgtcgaccgcgcttgaacgcggcacgctcaaaattaaatcgatgcagatcacctggctaccgattcaggggccgcagcagaaagcggcgaaagcgagagcccaggagtatatgagcgccgtgatgcgcgcgttcgtacccacgctcagcctgacgcaaagccagcagaagctgcagaaactgctgaccgccggaaaaggcaaacgttacttctccgaaacggaaggtgctgtgcgctatgtggtggcggacaacggcgaaaaggggctgaccttcgctgttgaaccgattaagctggcgctatctgaaacgctggaaaacaacaataaatgacaaaaagcaaagcctttccagtgatgaatctctatactgtttcacagaccatgctgcccgcgggggcggctatattccttaattcgctttaaagcgtggagaataaaaatgcgacatcctttagtgatgggtaactggaaactgaacggcagccgccacatggtaaacgaactggtcgcgaacctgcgtaccgaactggctggcgtaaccggctgtgcagttgccattgctccgcctgagatgtacatcgacctggctaaacaagccgctgcgggcagccacattcacctgggcgcgcagaacgttgacctgaacctgtccggcgcgttcactggcgaaacctctgccgaaatgctgaaagacatcggcgctgaatacatcatcatcggccactccgagcgccgtacctaccacaaagagtccgacgagtttatcgccaggaaattcgcggtactgaaagagcagggtctgatcccggttctgtgcatcggtgaaaccgaagcggaaaacgaagcgggcaaaacggaagaagtgtgcgcgcgtcagatcgacgccgttctgaaaacccagggcgcggcggcgttcgaaggcgcagttatcgcttatgagcccgtatgggcgatcggtaccggcaaatccgctaccccggctcaggctcaggctgtacacaaattcattcgcgaccacatcgctaaagctgatgcgaaagtggctgaacaagtgatcatccagtacggcggttccgttaacgcgggcaacgcagcagagctgttcacccagccggacatcgacggcgcgctggttggcggcgcatccctgaaagctgacgctttcgcggtgatcgttaaagcagcagaagccgcgaaaaaagcgtaattcgctttaaggcctttccccggtcgcgctttgcaaccggggttatcgcccggttgcccggccaggtcccggggaaatccccgagcggtgcagcctacagtttccccaacgcctgataccacaggtagtccagcggcagcaggatcaaatagcttaccgccgccagcgcaatacacagcagcattcccgcccttgcaggcactttccccagccccattgccaccacaatcggtgatgcctgatacggcagcagcggcgtggagtatcccagcacctgaatcataatcacgctcagcagcgggaagccggtcgcatcggagaagctctgcgcgaaggtggtatacagcgccggtacgccgttagcggtcatgataaagttcagcgcgctggtaatgccggtcaatgcgagaaagctggtgaacggactctctttatccagcggcataatctgcagcagggcattccccaccacgccgccgataccggtttgcgtcacggtgatagccagccccaaaatcccggcgacgtaaatacaggtgcggatattcacgccgctggaaaactcctcgccgctgataaaaccgacccgcggcagcagcgttatcaccgccgccgccagccccgtccaggccggccccactccgtgccagctctccgtcacccagagcgtcagcactaccaccagcagccacgccaggcgcttctcatcgcggctcatcggcggcagcggcgtcatgtcgcgcggcgggtgcggttttccgggaaacagccagcatatcagggcgatcagcacagcccctttgagccagccgagcaccggcgtatgcagcagtaaatagggaagataattcaaatggataccatacgatccctccgccgcgccgctcatcaccagattcgggacgttggcgggcaggatggtggcagacagctggaaggtcccgaaccccaccgccagcgccaggccaaaccacgggcgcgtcccctcttcaatgccggcacgcctggccattgccgccacaatcggcatcagcagcgcgatacgccccatattggacggcatcacaaacgccagcgcatagctgagcagcaccacgctgccgaccatcagcggccaggagtcggtcagccgcgacgagagcgaccgggccgctctgtccgccagcccggttttgcgtatggcgatccccagcacaaatccgctgaacaccagccagaacgccgatgaggcaaagccgccgaaaatcacctccggcggcgcgattttggcgatcatcgctgcggcaaaaaacagcagcgcggtcataaactccggcagtagcgaagtcgcccagaggagaatagtgatgccgacgatgatagaaggaaggaacagagggtgggacaaccagagcgacatacctgtctcctgtcgattttttcagcaagaatacgacggacgataagacaggtaaacgccagatatggtggggttattgcaggattgcgcagctgtgatcctgaatctcttccgccgatgcgcgattaagcgttagcaggttacgctcggtcgccagcagcaccagcgagccatcgctctgctttgccatcgccagcgcaaaacggcccatatgttcacgcgcttccggcacctcttcggccagcatcaggaacgggctgcgctgcgccagctccgtttcggtgacccgacgcgccagatattcgtggcccagtagtccaccgggcagcggcaaccagcggctgctgatagcgggcgcgtccttgtccaactgggtacggacatcgggacgcaggcaggagatatggatatggaaatgattttgcgtgcgtccgctgcgcgagttgatggtcaaggagaccgcgtcatccgatacggcggaaccacgatgctggctcatgatttcgcgcccctgccaggcctgccagaagaagttcggcgtcaggggattaagcagcagcggactttcggtgccgttaatacggtaagtcggcatcagcagatactgcagcgggccattgcggtctttaaacagcacatagccgcccttgaggttcacttccgcacagggcgcgggattctggtgctgctgttgattggggacgcactgttgcagaacaattttgcgcaacgcatcagggttgccggaatgaagccagtagtagccgccggccatcgccgccacaacgaccaccagcagcgctaataaaaggtatcgtactcttcgcattattttttcctgtctcagccagaaacggaagagtaacgcagtttgatgaccaaatgaaaacaggaagaggttcggtgtgttttcccggaggcggcgctaccagacttctcagccccgggtcgcggcttacgcctgtccgggcgacaagagttgtatccccgctaagcgcagcgcaagcggggataaggaaaggctatttaacgctggtttatctggtcgaaggtgccgccgttggaaaagtgctctttctgcgctttcgtccagccgccaaacacatcatcgatggtgaacagcttcagtttcgggaactcattcgcgtattttttcgctatctcaggatcgcgcgggcgatagaagttcttcgccgcaatctcctggccttccggcgagtagaggtacttcagatacgcttccgccacctggcgagtgcccttcttgtcgaccactttatccaccacggaaaccgtcggctcggcgagaatcgattcgctcggggtcacgatctcaaatttgtctttacccagttcgttggtcgccagcagggcttcgttttcccaggcaatcagcacatcgccgatcccacgttccacgaaggtgttggtcgcaccacgggcgccggaatccagcacctcgacgttcttaaacagcgcttttacgaactcttgcgccttcgcctggtcgccattgttctggtgcagggcatagccccatgccgccagatagttccagcgcgcgccgccggagcttttcgggttcggggtaatcaccgacacgcccggtttaatcaggtcgttccagtcgtgaatctgcttcgggttgcctttgcgtacgaggaacacgatggtggaggtgtacggcgcggagttatccggcagacgcttcagccagtttttgtcgattcggccacgttcggcaatcgcatcgacgtcataggccagcgcaagggtcaccacgtcggcttcaatgccgttgatcaccgaggtcgcctgtttgccggagccgccgtgggactgacgaatcaccacgttgtcgccggtttcttgtttccagtgcgcgctaaaggctttgttgtactgttcgtacagctcgcgcgttggatcgtaagaaacgtttaatagttgaatgtcttttgccagaacgctggcggatgccagcaacagagttaaccccacgccccacttattcatcgcaccgctctctttatgtagtgttgtgatggattaagcgtgccagaaagcggactgatgattaaagaataaaaaaagattggctataacttgtgagtatatagagcgggggagagtttaccccctcccgagcgggagggggcgggaagcatcagacttcttccatgcggcccagcagcgcctgcagacgatcctgccagccctgctgctgttctttcagctgaccgttttcacgctcaagctcttcacggctgtgctgcgcgctctgtacttcctgcgccagcgtgttgttcttctctttcagctcttcgatttccatctgtaacagagtgatggtatcaatcgcctgctgaactttagattctaatttctcaaacacttctaatgacatcgtcatacctctcctgaacttgcaaggcgttgatagaaaccgtccgtttcgtatacgcgttgacgccttaacgaaaattagcgcactacagtggtgatgtagtcgattgtatgaagccccgcctcccctgtccagcgacaacccgcgtagattgcggtttgcaacacttttcagcctttacctggtccgttcgccgcttttacccggtactttttcgtaattgttaatcaacacgtaaaaaaatgtgcggtgaaacgctcccgcaaacggccgaaaacgcgtttatggcgcgaaaacgctcattttcttgacgtggtacacacatttgaatttcgatatttctcgtttttgttcgttaacgataaattaacactatgcctacatggcagcgtggtcgcctgcgaccttcacacatacaataatcatcactacgcttcaggattcgattatgagccaaacatcaacactaaaaggccagtgcatcgcagagttcctcggtaccgggttgttgatctttttcggcgttgggtgcgtcgctgcgcttaaggtcgcgggagccagcttcggtcagtgggaaatcagcatcatctggggtctgggcgtcgccatggcgatttacctgaccgcaggggtttccggtgcgcaccttaacccggcggtcaccatcgcgctgtggctgttcgcctgctttgacggtcgtaaagttgttccatttatcgttgcgcaattcgctggcgccttttgcgctgcggctttagtttacgggctttattacaatcttttcttcgatttcgaacatacccacaatatggtgcgcggtagcgtcgaaagcctcgagctggcaggcattttctccacttatccgaatccgcatatcaattttgtgcaggccttcgcggtagaaatggtgattaccgctatcctgatgggcgtcattctggcgctgaccgacgatggtaacggcgtgccgcgtggcccgctggcgccgctgctgattggtctgctgatcgccgtcatcggcgcatccatgggcccgctgaccggcttcgccatgaacccggcgcgtgatatcggaccgaaagccttcgcctggctggcaggctggggcaacgtcgccttcaccggcggcaaagatattccttatttcctggtgccgctgtgtgcgccaatcgtcggtgctgcgctgggcgcattctgctaccgcaagctgattggccgccacctgccttgcgacacctgcgtcgtcgaagagaaagaagccgcatccccctctacgacgcaacacaaagcttcgctgtaatctgactacgggactcatactatgaccgacaaaaaatatatcgtagcgctcgaccagggcaccaccagctcccgcgccgtggtaatggatcacgatgccaatatcgtcagcgtttctcagcgagaattcgaacaaatttatccgcgtccaggctgggttgaacacgacccgatggagatctgggcatcgcaaagctctacgctggtcgaagtgctggcaaaagccgatatcagctccgatgaaatcgcggcgatcggcatcaccaaccagcgtgaaaccgccatcgtgtgggagcgcgaaaccgggaagccgatttataacgccatcgtctggcagtgccgccgtaccgccgagatctgcgaacagctcaagcgcgacggcatggaagagtacatccgcaaggccaccggcctggtggttgacccgtacttctccggcaccaaagtgaagtggatccttgaccacgtcgaaggcgcgcgcgaacgcgctaaacgcggcgaactgctgttcggcaccgtagacacctggcttatctggaaaatgacccagggacgcgttcacgtgaccgactacaccaacgcctcgcgtaccatgctgtttaatatccacgagctggactgggacgacaaaatgctcgatgcgctggatatcccgcgcgccatgctgccggaagtgcgcaaatcttccgaagtgtacggccagaccaacatcggcggtaagggtgggacgcgtattccgatcgccggcatcgcgggcgaccagcaggcggcgctgttcggccagctgtgcgtgaaagaggggatggcgaaaaacacctacggtaccggctgctttatgctgatgaataccggcgagaaagcggtgacgtcaacgcacggcctgctgacgactatcgcctgcggcccgcgcggtgaggtgaactatgcgctggaaggcgcggtgtttatggcgggcgcctctattcagtggctgcgcgatgagatgaagctgattagcgacgcgttcgattccgaatatttcgccaccaaagtgaaggataccaacggcgtgtacgtggttccggcttttaccggactcggcgccccgtactgggacccgtatgcccgcggcgcgatcttcggcctgacccgcggcgtgaactccaaccatattattcgcgccaccctggagtcgattgcctatcagacccgcgacgtgctggaagcgatgcaggctgactccgggatccgtctccacgccctgcgcgttgacggcggcgcggtcgccaacaacttcctgatgcagttccagtccgatattctcggcacccgcgtggaacgcccggaagtccgcgaagtcaccgcgctgggcgcagcctatctggccggtctggcggtcggtttctggcaaaacctggatgaactgcaagagaaagcggtcatcgaacgcgagttccgtccggggattgaaaccaccgagcgtaactatcgctacagcggctggaagaaagcggtaaaacgcgcgctggcgtgggaagagcacgacgaagcgtaagatgggagtattcccggctggcggcgtaaacgccttagccgggctaccgcccacagaccgcacaaccccgtagcccggctaagcgcagcgcgagccggggagaagccgcgccgatgtatgaatcccggagtatccccgggttgcggcgtaaacgccttacccgggctacagcccgcagaccgcacacacccgtagcccggctaagcgcagcgcgagccggggggaaaccgcgtcgatgtataaatcccggggtatccccgggttgcggcgtaaacgccttacccgggctacagcccgcagaccgcacaccccgtagcccggctaagcgcggcgcgagccggggagaagccgcgccgatgtatgaatcccggagtatccccgggttgcggcgtaaacgccttacccgggctaccgcccgcagactgcacaaccccgtagcccggctaagcgcagcgcgagccggggagaagccgcgtcgagtcatgaatccctgagtatccccgggttgcggcgtaaacgccttacccgggctacagcccgcagactgcacaaccccgtagcccggctaagcgcagcgcgagccggggggaaaccgcgtcgatgtataaatcccggagtatccccgggttgcggcgtaaacgccttacccgggctacagcccgcagaccgcacaaccccgtagcgcaccgcctccgggtttttatcagccaaataccggcagcagcagatagagcttaatcaccagcgcgttaacgatatcgataaagaacgcgcccaccatcggcaccaccagaaacgccatgtgcgacggaccgaaacggtcggtaatcgcctgcatgttggcaatcgccgtcggcgtcgcgccgaggccgaaaccgcagtggccggctgccagcaccgcggcatcgtagttttttcccatcatccggtaggtcacaaacaccgcatacagcgccatagccactgcctgaaccgccagaataataatcatcggcagcgccagcgacgccagctcccacagcttcaggctcatcagggccatcgccaggaatagcgacaggctgacgttacccagcaccgacaccgcgcggtcgaacacgcggtacaggcccagcgccgacaggctattgctcaggatcacgccgataaacagcacgcaaacgaaggtgggcagttcaaatacggttcccgccagcagttgcgcaacgatcttccctaccgttaaacagatggcgatcagcgcgatgctctcaatcagcaccagcgacgtgatcatgcgccccatatccggcttttcaaacgcggtcggcgcgagctgatcgtccggcgtaccgtccggggaggaagagtgcttaaccagatagcgcgccaccggtccgccgatcaggccgcccaggacgaggccgaaggttgcgcaagccatggccacttcggtagcgttggcaaagccatagcgttcaacaaacaatttactccacgccgcgccggtaccgtggccgccggaaagggtaatcgaaccggccagcagccccatcagcgggtcgaggccaagcagcttcgccatgccgattccgagcgcgttttgcagcagcagcagccccaccaccacaatcaggaacgtccccagcactttgccgccggagcgcaggctggcgaggttggcgttcaggccgatagtggcaaagaaagccagcatcagcggatctttgaggctcatatcgaaatcgatttcgatatccatgcttttctttaataccagcagcgccagcgcgaccagcaggccgcccgcaacgggttcaggaatggtgtatttcttcaggaaagggacggtttgaacgagttttctacccagtagcaacacgagtgttgcggcaacgagcgtcgataaggtatcgagatgaaacataaaaaagagctccttataggcgcatgatccattcacacgcgacggtattcccggtgtcgattgcttctcatcatgagtaatcgggaagggattttaagcagaagtacggaaaaaaggacaggaaaagatattttgtagggataatgatgcgatcaagcatacaaaatgttaataaatttttgacacttattccctgcttaaatatttgccgctaaagagtggcaaacgtttgcttttggtctacagtccgataaaatccccgctttgccacctttgggattgttgtgatgtccgttaacaccgcagaatcagaaaatgcgcaaccggttgcgcataagcaaaccagcgaattaatctaccgccttgaagaccgcccgccgctaccgcaaaccctgttcgccgccttccagcacctgctggcgatgtttgtcgcggtcatcactccggcgctgttaatttgccaggctctgggccttccggctcaggatacgcaacacatcatcagcatgtccctgttcgcctccggcgtggcctccatcattcaaattaaagcctggggcccggtggggtctggtctgctctcgattcagggcaccagttttaacttcgtcgcgccgctgattatgggcgggaccgccttgaaaaccggcggcgccgatgttccgaccatgatggccgcgctgttcggcaccctgatgctggccagctgcacagagatggttctctcccgcgttctgcatctcgcccgccgcattattaccccgctggtctccggcgtggtggtgatgattatcggcctgtcgctgattcaggttggcctgacctccatcggcggcggctatgccgccatggccgaccacaccttcggcgcgccaaaaaacctgctgctggcagggatcgtgctggcgctgattattatccttaaccgccagcgcaacccgtacctgcgcatcgcttcgctggttatcgcgatggcggccggctacctggcggcatggctactcgatatgctgccggccaataccgcgccgacggaaagcagcctgattatggtacccacgccgctgtactacgggttaggcatcgactggaatctgctgctgccgctgatgctggtgtttatgattacctcgctggaaaccatcggcgatattaccgccacctctgacgtctccgagcagccggtttccggcccgctatatatgaagcgtctgaagggcggcgtgctggccaacggtctgaactcgtttgtttcggcggtattcaacacctttccgaactcctgctttggccagaacaacggcgtgatacagctgaccggcgtcgccagccgctatgtcggtttcgtggtcgcgctgatgctgatcgtgctcggcctgttcccggcggtaagcggcttcgtgcagcatattcctgagccggtgctcggcggcgcgacgctggtgatgttcggcaccattgccgcctccggcgtgcgtatcgtctcccgagagccgctgaaccgccgagcgatcctgattatcgccctgtcgctggccgtcggcctcggcgtttcccagcagccgctgatcctgcagttcgcccctgactggctgaagaatctgctctcctccggtatcgctgctggcggcatcacggcgattattctgaatctgattttcccgccagagaaaaactgatcctctctgacgctccggccacgcgatgctggccggagcgtcagcatcatcaacctcacatcatctcattacacaattcctgtcttgaggattgcgcataattcgggcataacagccttatgtgcctcgctcaggatcgaagaccatgaaatttctcagaaagctgattctctggctgctgattgccctgctggtggtgattattgccgcttacttcctgctgcaaacccagtggggcggacgccaggccagcgcctggctaagcgacggtaccggctggaaggtctctttcaacaagatggaccataatttctcctcgccactgcacctgcagctgcaaaacgtcaccctcggacgcgacggcaaacccgccacgctggtggcgcaaacggtggatatcgggtttagcagccgccagtttagcgacccgctgcatgctgacgaaatcgtcctcagcgacggcacgctgaacttctccccttcttccgcggcgctgccattcgccgccgaccgtctccagttgcgcaatatggcgttcaacagcccggagagcgactgggatctgagcgcgcagcgcgtcaccggcggcgtcagcccgtgggcgccggaagcgggcaacgtgctcggcaagaaaacgcagattcagatgagcgccgggtcgatgacgctcaacggtattgaagccagcaacgtgctgattcaggggaatattgataacggcgaagtgtccctctcgaccattggcgcggacgtcgcccgcggtacgctcaccggcacggcgaaacgcagcgccgacggcggctggcaggtcgataatttgcggctcaacgagattcgcctgcaaagcgataaatcactcgccgactttttcgcgccgctgaccaccctgccgtcactacagattggccgccttgatgtgaccgacgccagcctgcaggggcctgactgggcgatcgccggcctcgatcttaacctgcgcaacctcaccctgagccgcggcgactggcaaagccaggagggtacgctgtcgatgaacgccaacgagtttatttacggctcgctgcacttcctcgacccgatccttaacgccggattctcgccgcagggcatcgcgctgcgccagttcacctcacgctgggagggcggcatggtgcgcacgtccggcaactggctgcgcgccggccatgcgctggtgctggatgacgcggcgttcgccgggctggaatatacgctgccaaccaactggaagcagctgtggatggcgccgctgcccgactggctgcaaagcctgacgctgagaaagttcagcgccagccgcaacctgattatcgatattgaaccggcgttcccgtggcaaatcaccgcgctcgacggctacggcggcgagctgcagctggtgaaaaaccgcagctggggcgtgtggagcggtagcgcgacgctgaacgccgccgccgcgacctttaatcgtattgatgtccgccgcccgtcgctgaagctgagcgccaatgcctccacggtgaacgttaacgagctcagcgcctttaccgagcgagggatcctgcaagccaccgcggcggtgtcgcagctcccgcagcgcctggtcaacctgagcctgaacggtcgcggcgtgccgctgaatattttgcaggcctggggatggcccgcgctgccggtttccggggacggtaaccttcagctgacggcgaccggcagcgtgctggcggatgcgccgctgaagccgaccgtcaacggccagctgagcgcgataaatatggagaaacagcaggtggcgcaggtgatgcgcaacggggaggtcaccagcacccagcccccttcagcgccggcgacaacgacgccctgactttccccctccctctcccccacgggagaggggcctgttccattcgcgaaacctgttgccattaagcggctgtttgtacctatttcccgcaacctgttcctttcaaatagcggacttgctataacaaaaatactggaagttaaaaaaataattaaagtccctgaacctatacccaaaataattcgagttgcttaaaggcggcaagggagtgagtccccaggagcatagataactatgtgactggggtgagcgacaaatctgccgggagcagatttgaacgtcgcttgcgacggcccgtgagggcgaggcccttggatgggccgagtaatccgtagctaacacataagcaacttgaagtatgacgggtatacaaaaataaaggaacgaccatgtctgtaatacgtcaacgtattctggagaatatgcaaaaattctccagagcaatgatcggtgcagtattgttcttgccggtcatcggcttaattttggcactcagttcagtcttaaccaacccaacattaatttcggagaccagctttttacaccagctcggccagctgctcggcgatactttctggcctttattcggcaatctgggattacttttttgcgtcggcatcagctatggcctggcaaaagataaaaaaaccgaagtggcgctggtgtcggtgatgtgttttatcatgtttcttggcgccaaccactcgtggctggagcatacccacggactcgcggaaaaaattaacggcgaatattacggtaccgggcagactcagctgctggggtttgtggtagtcgatatgggggtcttcctcgggattattctcggctgcaccatcgcctgggtgcataacaaagtgtcgacgattgaactacccggcgcgctctccatgtacggcggagccaagctgacgctggtggcgatgaccccggtcgtcattttctacgccatcgcctttacctggatctggccgtttatgacccacggcatcgcggcgctgaccggctttatgaaaaacgccggcgtggcgggagtcttcgcctacggcttctttgaaaaattcctcatccccaccggcctgcaccacttcgtctggtcgccgttccagctcacgcaaatcggcggtacgctgaacgtcgacggccaggtcgtctccggcacccaggcgattttcctcgcctatatgcgccacccagatttaaccccggtgatgaacgaggcgctgcgtttctcgcagcaggggatgaccaccatctttggcctggctggcgcctcgctggcgttctaccacacggcgaaaccggagaaaaaaatgatggccaaagcgattctgctaccggccattatcacctctatgctcaccggcatcaccgagccgattgagtttaccttcctgttcgtttcgccgctgctgtgggtgatccacgccacgttaaccgcggcctcgcaggcgatttgcgacatctttaccgtgcgtccctggggcgcttccgggctgattgagttcctgatttacaacctgccgctgccggtctccctgacccgctggcccggctacgtgcttatcgggattggtcagttcgccgtttactacgttatcttccgcacgctggtcgttaagttgaatcttaaaacgccgggtcgtgaagacgatgaaaacgtgaagttatatagcaaagctgattaccgaaaaaaaatgggcgaaccgcagtcggtcaccaacgaaattattaatggtctgggtggtaaagagaacattatttccgtcgacaactgttttacccgcctgcgcgtcgttattcataatatggatctggttgacgatgcgatattaaaaagcaccggcgcaaacggcgtagtacgaaatcgaaatgaagttcaggttatttacggcgtcaaagtgggacaggttcgttcccgggttgatagctggctagcagaaaattaattgggagtgatttatgaaattaaccgtattaggcgggggcggcgttcgctctgcgtttctggcgaaatctctggcatataacgcgcaccgcattggtttaacggaagtggtctttctcgacagctccgcggagaatctgacaatattcggcgagatcgcccgttatgtgtttaatgccattcgcccggatattcatttcagcgtaaccagcgacccggtgccggcgctaaaaaatagccactatgtgataaccaccctgcgggtgggcggcgatgagagccggatccgcgacgagcgtatcgccctggcgcacaacacgctgggccaggagaccaccggcgcgggcggtttcgccatggcgatgcgttccattccggcgattcttcactactgccgcctgattgaagagcacgccgccgaagatgccattctgtttaacttcaccaacccgtcagggctggtcaccgaggcgattatcaaatccggctttaagcgtcgggtgtacggcatctgcgatgccccgtcggagctgattcgcgagctgcccgagatcctcggctgcgacgagcgcgatctcggcgtcgagtgctacgggctgaaccacttctcctggtttacccatttcaccgtgcgcggcgaggatgtcaccgagcgcctgatcgccagcccggacctgtatcgcaagacggcgatgcagtacttttcgccggagctggttcagctatgcgataagcagctgcttaatgaatatctttactactactactatcgcgaagtggctttgaaagcgattcagaacgcgccggaaacccgcggcgagcagattgcgcgcatcaatcacgatatgcgcgaagcgctgctgaccgttgatgtcaaagccaacccggaagcggcgtttaccatctggatgaagcactatctgcgccgggaaaatagctatatgcagaacgagtcgcagcaggaaaaattccatacccgcgagccgttgaccttaaagcagtttatcgaggagccggataccggcggctacgccggcgtggcgctggatattctggaggcggtgaacagcaccaccaccaagcgcatcgtggtatcgatgcccaacaacggcacgctggacttcctgcgcccggacgatgtgattgagatcagctgcgacctgagcaaagagggcctgaagccggtgacgccgaagcatgtgccgacggcgcagaagaatatgatcgccagcgtgaaagagtatgagcggctggcggtggcggccattctgcagcgcgataaatcgctggcggtacgggcgctgatggcgcatccgctggtcggctcttattcgctggcaaaaacgctggttgaagcctatctcgacgataagcagttcgccgactggcaataaacgcccggtgaaatcccccggatggcggctaacgccttatccggggaatgtgccgggcctgagacatctactctgttgcatcccggtggcgctgcgctgaccgggctacggattcaccgccgtctgcggatcggtagcccggacaggcgcctcaggcgccgcctccggggatccccgtctgcataaaccacatcttcagcagccgctcaaagccgagtatgcagtagccaaaaaaggggttactccagtaaatatcatcatcgaatttctgcggatcatggatgataaacgccgtatccgccgcctgcgccagcgggctttgataatcgccggtaaagcagaccaggttaatctcctttccttccagcgccttcacccagttcagcgcggaactgctgcgtccggatttggaaataatccagatcgaatcaaatttggcggcgttcttctgctcgaggatttcgtaatccggccacagcgcgaggctggcattcaccccggtcaccaaaaatttattataaatatactgggcgatcagctgcgaaaacccactgccgtgaatcaaaatgcggtgatgttgcaggctttccagcaatggcgttatccgctccaccggctgaatgctcatataatcgatgtcgttggtcacatcgagtttgggcatagtgatattgaatttaataaaatagaccagctccagccagccgctgaatttcagcttcttcgccaggcgtaccagcgaagacggattgctataacagtgctccgccacggcgcggatcccttcgcgaacgcattgctcaggatcgttctgaataaaacgcagcacggtcatttccgttttgcttagcttaacgtcacgaaagatgttttctaaatccataccgggctcctctcagcgctaaactacgctatcacccggcggctctggcgtctgtggcatcaatcaccagaatgaaatgaacgttacttttttacacaaaatggaataaaaaaaccctccggtaaagagggtgatggattcgacaacgtctatctcttttcagcgccgtattcactgcacaataaccattttttcggttcatcttcctgaatcatcgggaagcggccgctatcttccagaaaacggttgtcgcgcttatcatcgttcaccatcgaaatttcccagcccatcaccagcgcgttttcagcccaaaaacggtggtacagcgtgggcggcaggcaaacgccctgcccggggttaagaaccagggtgtctcccggtttcagcgtgcgctggaggccatcaaccgcgacgctcacgctgcgctgcatatccagccgttcatcttctgtcgcccatgccagctgcagacagagccggccgccgccgcggttcagaatatcttccattttgtgataatgaaaatgccagggggtttgctgatcctgctgaatctgcaacatcttctcggcgtagggcttgggatagcgcgaatcgcccggcgcgccgttacgcagggtcaacagcgtcagtccggtttcctgaaaacggccgctgccaaaatcggtaatatcccagccaagctgtagatcccgaacttctcgccactcttcaaaccgctttttcgcccagatatcggcggtaaagcaggcaaactcgggtaagcaaatgcgaaaggactcggcgatagcatgcgctttatcaatcgcgtagttaatctgtgaacgtttcattttcgactccgcttcggacggccagccaggcggcgccgcgcatgccgctactgtcaccatgtcgggcaggcacgatgggggtggtgaaatggtcggtaaacaccagcggggcgacatccgcctccaggtcgttcaccagcagcgccacgttagacagaccgccgccgagaacaatcacgccgggatcgataagattcaccaccgtcgccagcgtccgcgccagctgctggcgaaagcgcagcacctgctcgcaggcggcatgctcgccctccagcgcccgggcgataatagcctgactgctgagcgcctgccgggtcatcaaacgatagcgcgcgctcagcccggtgccggaaataaaggactcgacgcagttatattttccgcagtagcagcgctcgggcggcccatcgttgacctcctgatatcccggcagcgtgatatgcccgcactccgccgcaatccctgacgcgccggggaaaatctggcgattaagcgcaataccgcccccgcatccggtccccagcgtcatgccaaataccagcgaataatcggcacctgcgccatcacaggcttctgataaggcgaaacagttgccatcgttcgccagcacaaccggctggcccaggcgctgctcaagctcatcctgtaagcggcagccgttgatgacctgaatattggcattgcggatcttgccggtctgcggggagatactccccggcagagcgataccgatagccaaaggctgagccagctcatccccaatcgcggtgattaacgccaccagcgttgcgataaactgctgccgggtctgttttcgcgtttcaacgcgaaaacgcttccattcatggccttgttcatccatcactacggcggcgattttgctcccgccgatatccagccccaaatacttcataccggcctccttattcatagcgaggcaggtttccccgccccgccgggggattagtacaggctggccttgccggtagagccaaagagcttcattttgtggcgaatcaccttccgcgcggcgttaataggttccggataaatgacattcggatcccaccatgtctcttttgtcagaatttcgcgcactttctggaaataggcatatttcatatcgctggaaatattgattttgccgacgccaagcgtaacggattccgcaatttccgcatccggattagccgagccgccgtgcagcaccagcggaatcgacagacgcccggcgatatcgcgcagaatgtgcatctgcagctccggctgcatccccttcggatagataccgtgcgcggtgccaatcgctaccgccagcgtatccacgccggtacgggcgacaaaatcttccgcctgcgccgggtcggtataggtgacttctgacacgccgccttccacagaggttccggtctggccgatggtccccagctcaccttcgaccgacacgcccaccgcgtgcgccagctgcaccacttcgcgggtcagggccacgttttcttcataaggcagcagcgaaccatcgatcatgaccgaggtgaagccacactgaatggcgcgcaggacatgttccaccgaggcgccatgatccagatgcagggtgaaaggcacgcggctgcgctgggtgatatcccgcacgtagctaaaaaacgcgtcgccaacaaaatcgtgctcgctggggtgaatagaaataatcgccggcgtatttgtcgcttccgcctcttccaccacggcgcgaataaaacagctatccgccacgttaaatgcgccgatagcaaaaccatgttcacgggtgggtttaagtaattcgtgcattgaaactaacatcgttattctccagtttcagggtgtggtaagccctgccagggcatacgggcgccggcatggaaggccttactgagatttaatcaggctttgttgattgagccggatgcgtgtaaatagggaacgatggcgtcagcgctggcctgctccatcaccgatagcgcatcggccagctcaatggtgctgtcgtggcacagggtgtgcagcagcgccgctttccccgcttcaaatacccccgccccaacgttgatttttgcgaccccgaattccgggcaacgttgcagctgctcgaacggcgtaccgctcccgccgtgcagcgccagcggcacggatgacgcgcgctgtatctgcgccaggcggtcgaaatcgagcatcggttttacgccgggggcgtacataccgtgggcggttcccacggagaccgccagcaggtcaatcccggtctgttcgataaagggagggacgtcctgcggctgggtcattaaatcggcattgctggcctggtcgtagcgcggcgcatccgccaggtgccccagttcgccctccacgcacagcccaacgctggcggccagttcagcgacctctcgggtctggcggatgttctccgccagcgcgaacgccgaagcatcgatcattaacccgctaaatccggcgcggaaagcctgacgtatttttatcggatctttgccgtgatcgagacttaacgtcacgggtacgctcgcctcctccgccagtaccctgactaccgccgccgccgtcgtcgccggaaagtgcgacagatgcccctgatacaggttgagaataatcggcgcgcgatgtttttccgccacgcgcaccgccgcgcgtgcgctttccaggttcatgcagttaatcgccagcagggcataccgttcacgccaggctttgatcaccatacttttcatatcggcaaacatagggcctccgtttattcgagggtaaaggtgatttcgtcgtctttgaccttttggtcgttcagctcatcaaactcttcatcgcgctcggttaccggctttttccacagcgagagcatcacaccgcaaatcacggtgccaatcgccagagagaggcagaacagcaggggatgcgtaaagagcggcaccacaaacattccaccgtgcggcaccggactctccacgccccaggtcatgatcaggccaccggccaccgctgacgccaccacgcaggatcccacgacgcgcagcagatcgcgggcggcgatggggatcaccccttcggtgatcatgcagatccccatcgggaacgcggccttcagggcttcgcgttcggcacgggtatatttatggcgggtcagcaggaacgagagggtgataccgaacggcgggattatcgaacccacaaacttcaccgcttccgggccgtaaacgccgctgaccagcagaccatcggcaaacagcgacatggttttattcaccggaccgccgaagtcgaaggtcgccatggcgccaaggatggcgcccagcaggaaacgcgagccgccctgcatcgactccagcatgtgaatcagcgcgtcctgcagccaggcaatgggcttgccgatcagggtcatcatcagcaaaccgctaatgatggtgcttaataccggcagcaccataatcggcatcagcccctgcatcgacttcggcagccgaatatagtgttttagcgccagtaccgtgtagcccacgaggaatccgcccagcatgccgccaataaaaccggtatgaatttgcccgcagacaaaacccacgatcaaacccggagcaaatccaggacgatcggcaatggagtaagcgatagcggcgcagatcaagggcacaatcagccccattccccagccgccgatttggtttaacatccacggaatggtgccggttttctcgccaacgttcgtcccgccaaggacttgtcccagcgcgatacagatcccggcggcgacgatcagcggtatcatccatgaaataccagttaataaatgcttcttaatttcctgtgagacgggaattttattctcactcatggtagatccctccagattaaggatcaggcattcgctaaggatttttcgaccttttcgataaactgaatcggcgacttaatcacgacttccgtttttactctgacaatccgtttatttttaaaacgctcttcgcctttaattttcacatcaatggcaagaataacgacatccgcagcgtcaatatcttcggccgccagttcattttcagtaccaatggttccctgggtttcgactttgacattgtggcccagcgctttcgcgcctttaatcagcttctcacgtgcaatataagtatgagcaatacctgcggtacaggcagcaacacagacaatattcatctcggactccgctagttattgttagtaaatgtccgactcggcatattggttaaacagatcaataatcctctgcggactggtttctttgagcagttgttcaataatgtcatcatccgccagcgctccggcgacctgggacaacaggcgaatatgggtggtattttgatcttccagacgaacggcaaataaaataatgcagcgtacctggctgccgtccagcgtttcccaggcgatatcctgccgggtgcgaccaatggcaagggtggtattaacaacggcggacgactttccatgcgggatcgcaatatgattttcaaaccccgttgagccttccgactcacgctgccagacatcctgaataaaggtttctcgacagcttatcgccccgtctttttgtaataagtcggttaactcctcgatggcttccgctttattcgtagcgtgcatatctaacaaaacgcgtttggtgtttaaaatcctggttatgtccatattctttacctcatggatataaaacttcattatctacagcagatattgccgcgcgatgtaatttgtcggtaacgattttttccgtaacccgccggatatcggcatcattaaaaaatgcgctaacatagactaccggcagagctatttccggcagattgatcgtcgaaataaccagttcaatcttgtcctgcggctgaagggtatgcaggctgcttgccgaaaccacgccgacgatggtccagtcaggaaacgctctcaacactctacttttcaacaggtgagatgtgccgattccggtagaacaaaccagcagaacgcgcttgctggcgacctgtctttccatcgccgcctggaaatgaacggtgagatagccaatctcgtcgtcggaaaccgcacgctcgccccagcggctaaaaacctgattgaccgcccgctgggtgagcggccacacgtccgtcagctcgcccttgatatcctcaagcagagggttacgaatataaatccgaaaattaaggcggttaatgagcggcttgatatgaatgagcagaccatcgtataacgcgcgatcggcggttaaatcgagatcaatcatggtggaaaaagcgctaatcaggcgatcggtaatttgtcgggcctcatcgctagaatgcatatagcgcaccatgctgacatcatctcgctcttccaccacaacgccagaggagatgatgtactgataaataaaccagacttcatcttccggcagcgaatggtcaatacggtgttcaatttttcgcagcatattctgggcaacgctaaatatcgtctcatcaaaaatctgctgcccctgttcacgccgcggtaaggcattcccacgagtaatgcgatacatcataatgaggatatgggtaaaaatattcacataatacggttcgcctaatgaccagcacagcttgcgctccatttcctgtaataatgactgaacaaataaaacgtcatcctcaccaaaataatgcaccagcgctttatagcttcctgagtccagccgggaatggataatacagccgggctcattatgattaatcaccccattaattaacgacgccatcgcctggcggacgctgttttcgctgccttcaatatgcgtcccgctctggctacgaatcagcgttaagccgagcggagcaatccatgactcaataattttcagatcattaacgatagatgcactactgataaaataacgctcagagagcttattaattgatgtctcccgcggagtctcacttaagagctgcgaagcaattttcacacgccgggagttattcatcatgacatcgctgtcctccccttcgttaccgagtaattggtctaattgcagcagatccgtgacattatcagcgatcagcatcacgccggtgcctgagcgtttgtcgatagtcattttccactcagataaccactgttctaaaaagcgtaaatcacgctgaaccgttttttctgaaacatttaaatattcagcaattttcagcagcgtaacgtattctctgcggggcaggagaaatttcaataatctgttctgtcgtgaggtaatcatttgcattatttacccttattgcataccagattaatgtctggaggccagcgcgataccacgcgagcgctacataaatcattgaggataaatataagtagcagaggcgtaaacaacaatactaaattttgtccagacatccggacagaaataaaacgaagagagggattaaggaataattataattcagatcacatttcaggaagaaatatacgtgatagcgatctcaattcatcataagaatatacccgggaatggttaaccgcctttagcctgacagcattcccggaggcggcgcttgacgcgccttgtccgggctaccggcgtgcagacggctggaaacctgtagcccggttaagcgcagcgcgagccgggaagcagctgcgctgatgcatcaggtttggcaccttccccggaggcggcgcttgacgcgccttgtccgggctacggcgtgcagacggctggaaacctgtagcccgactaagcgcagcgcgagccgggaagcagctgcgctgatgcagcaggttcggcaccttcttcccggaggcggcgcttgacgcgccttgtccgggctacggcgtgcagacggctggaaacctgtagcccgactaagcgcagcgcgagccgggaagcagctgcgctgatgcatcaggtttggcaccttccccggaggctgcgcctgatgcgcctgtccggctccaaagcgcttacagcgtaaccgtcaacgcattgctctgcgcggtcaccaccacgcccagctcgctacccgcctgagcgccgccctgcacgcccgccacctgctggatgttgcgcaggcacagcgtccagccgctggcctcaccgtcaccgctgacggtgatgacgttgccctggcgtttcgccgtcagggtaaagaccaccgacccgtccgcggccggcacctggcagacggcttcgcgaccatcgtcgaggctaaacagctggaaggcggtaccttcgttccacgcgtagtccggcttctggtcattgtttcccagcgccagcagagtgttgtcacgcacgtacaccggcaggctcagcacatcgtgattctgcttatgccagcggctaccctgcgcttcatcgttgtgccacagatgggtccagcggccttccggcagccagaactggacgtctcccgcttcgctaaacaccggcgccaccagtacggaatctcccagcatgtactgccgatccagatagtcgcaggccggatcgtgcgggaattccagcatcatcgaacgcagcatcggcgtaccgaactcattggccagcgccgcctgacggtacagatacggcatcatgcggcatttcagctgcgtgaagtggcgcaccacgtcgcaggactcgtcatcgtaggcccacggcacgcgataggatttgctgccgtgcagacggctgtggctcgacagcaggccgaaggcgcaccagcgcttgtagacgtgagcgggcgcggtgttttcgaagccgccgatatcgtggctccagaacccaaagccggacatgccgatcgacaggccgccgcgcaggctttccgccatcgattcatagttggcgtagcagtcgccgccccagtgcaccgggaactgctgcgcgcccaccgaggcggagcgcgcgaacagcaccgcttctttctcgccgacggtctctttcagtacgttccacaccagctcgttatagatgaaggcgtagtggttgtgcattttctgcggatcggaaccatcaaaccactgcacgtcggtcgggatacgctcgccgaagtcggtcttgaagcagtcaacgcccatcgctaccaggcctttcagcttgtcggcataccactggcaggcttgcggattagtgaagtcataaatcgccaggcccggctgccatttatcccactgccacagcgaaccgtccgggcgtttcagcagatagcctttctcctgcagctctttaaacaccggcgaacgctggccgatataggggttaatccacacgcagaccttcagccctttctctttcagacgcttaatcatgccttccgggtcagggaaggtcaccggatcccattcaaaatcgcaccactggaaggccttcatccagaagcagtcaaagtggaacacgtgcagcggcaggttgcgctccgccatgccgtcgataaagctgttaaccgtcgcttcatcgtagttggtagtgaacgaggtggtcagccacaggccgaaagaccaggccggcggcagcgccggacgcccggtaaaccgggtatagcggttcagcacctctttcggggtcgggccgtcgataacgaagtactccaggtattcaccttcgacgctgaactgcaccttagagactttttcggagccgatttcgaaagagacgcgctcaggatgattcaccagcacgccgtagccgcggttggtcagatagaacgggatatttttgtacgactgttcggtgctggtgccgccgtcttcgttccaggtgtcgaccgtctggccgttgcgcaccagcgcggtaaagcgctcgccgaggccgtaaacggtgtcgccgacgccgagatccaggcgctcaaacatatagttacgattcgttttcgtatcctgcacgtagccgtcgtttttcagctggctaccggtaatccgcacgccgtcgcgcaggaaatccagcgaccagaagtcgcctttcgtgacgcgagcggtcaaattgccgctcttcagctcggcatactcagcgccgttgttaatctccaccttgacgtctttcagcacattcagcgggtaatgcgggccgttgttcaacgcgccctggaagtgctccatacgtacgccaatcaccccttcctgcggagagaagaagcgcacggtaaatagcggaacgtccagctgggcggcacgctcgcgcacttcgcgcgacgcgacgtagaccaccatgtcgttgccctgttgctcaacctcgtacacctgtacaggttggatcagattgagccctggttgaataagccagtttccatcactgattttcatgaatagcttcctcttagttttgcaattctttgccgttcggcgctgaaatgaattcctgttcgttgcggcgcgcgccctgagccagctccgccatcatctttttcaggaacggggttttcagggtgtagtagcgtttcgcgataaccgcgctcagcagataacagaccgccggagcgagggtgaacaatgagatgatgatggtgatagtggcgctgttctgggttttggccgcggcatcgtaaccgccgcccgccagcatccagccaatcagcgcgccgcccagcgccaggcccagcttgagcacgaacagggtgcccgcaaagctgatgccggtcaggcgtttgccgttacaccattcgccgtagtcgacggtgtcggacatcatcacccactgaatcggcgtcaccagctggtgcagcacgccaatcacgaagataaaggcgaacatggtgatttcggcgtccatcggcacgaagaacatcgccacactcagcgccgccagcagggcgttagtccaccagaagacgctgactttgcatttccagtcggtgagcggcttcgccagcgccgagccaatcaggttgccgacgcagtaggtggtgaggaaggcggtgaacagaccagcggaccccataatccaggtggtgtagtacatcatcgcgccgccgcgaacgcagaccgcgaggatgttgaggatggtcagcagaccaacgacacgccactgatcgttgcgccagatatcgcgcaggtcttcccgcattgaggtagagctcggtggcgcttcgacgcgctctttggtggtgaagaaacaaaacgccagcatcaggaaagcgatcgccgacagcaccgcgatgccgccctgaaagccaaaggctttgtcttcgccgccgataaagttcaccagcggcatcatcagcacggtggagagcatgccgcccgccgtcgccagcacaaagcgccaggactgcagggagatgcgctgcgttgggttgtcggtgatgaccccgcccagcgcgcagtacgggatgttgaccacggtgtagagcagggtcagcagcgtgtaggtgaccgcagcgtatatcagcttgccgttatgactcaggtccggcgagctgtaggccagtacgcacacgaggccgaacggaatcgcaccgaacaggatccacgggcggaattttccccagcggctgcgggtacggtcggccagcagccccatgcaggggtcggatatcgcatccagcgcgcgggccagcaggaacatggtgccgacatagccggcaggaataccaaagatatcggtataaaaaaacatcatatacaacatgacgttatcaaaaatgatgtggcttgcggcatcgcccatgccgtagccaatcttctctttgacggataaaatatgatctttcatcgcacactcttctctcagcgctgccgcgggttggtaccggttacatgctttgtaaaccatccgcgcagtaagatgaattgcgatatctcatattcaaattacgtttcttgttttatgtgatcccggtagcctgaaagagtgtgtaaaagtgtaagccacggattttgcaaggaattgtttaagaaggttctgtaaagtccagttttaacagtaaaaaagtgcgttgggggatgtggttaatgcaggaaagtagctataatgcgccccgcctccatgtagcaatcgaggcgcggaagatcgtcatctccggtgaggtggctggacttcaaatccagttggggccgccagcggtcccgggcaggttcaactcctgtgatcttccgccaaaattgccccacatttatcaaaaaatctacttaattttcaatagattaatcaaatatatcttttttactatttagacaggcttctaagagctgttttaatgtcacagttatcacgtgtctcccttgtggttaatgccggaacggcgtgctgtagctaccctgcacctaacgcaactgtggggggtctactaatgccaatttctccggttcagtagcacatatcacttcgtattccttccatgagtttttgcttccactttctttcatcacagcccctaatgtttctcgtcaattatacaaggcgcacactttctgaaagggattttcatattcagcatattattatgacgagttttctggtataaaaataaaataatactctcatttatttgataaatataaattgatacttatggaaggaactatatgaaaattaataatctcagtatgattgtttctatgataacaggaataatcactactattataacaatatatagcattaacaaaccggcatcacaccttacagcatacgttactgataatatattttataccccaccccaatataatgaaattatgagccttactcttgatgaagcggattataataatatttatgatcgcattgatagtgttgcacaaaatgccagatttgaagaaaaatcaaaatttgttaaggaaattattaattctattttaactccatttaaacctccatttcaaaatggtttagaggaatataaaaaattgatctttatcaatgtacataactcaggggatgcgtcagcaaaagatttatatattgactatcctgagaaggttttagttatggttatagacgacaaaaaagaacaaattaaaaaaccagatgcgcttactcgcttgtcaataccatcaataagacaaggtggaaattataaggtttgggcttgggctaaaaataataaatttaaaaaaagcgatattagaattggaaatgaaaaccaaattgccaagattaaatacggtgaactacattttggaacttcatcaaatatagcttctttttatgaaaatcatgaaacaataataaaaacaatttttacgatagtaatgtccttgggaagtctgacaatttgcttcctgctattccacttaagaaaaaaatattgaaaacagagtgaaaaaattatcccttaggttcaatacccctcgtccgcaaagcctccctcgccagctccttcaaccaactggcgagactcaccccctcttccgctgcaacagcatccagctgctcctttaatgccggatcaatgcgcattttgaactgcggagactgaccgccgccctttggttttttttcgcgcgctatgattgacatgaggccacctatccaactaatcttaacatataggaggccacctaaaagcctcttgtacaaacaacgctccgaagtgcgggaacacagccggagcgtctaaccacaccaactatcaaggagttgattatggctgattcgtattctaccccagactttgccgtttccggaaccgagcgtcacctgattgtgggatatcgcccgcaaggtcgggacaccagtacaccaagtctcaccctttccggcaagtggttacgcgcagcggggttcgataccggaaagcgcttcacagttaaggtaatggatggctgtattgtgctgctgccgcagagcgataaggaagaaatgcttaaagcggagctactgcaaattcagcaatcctttaaaagcgtcaacaacacgcttcatctcgtctgacgcccggacatgttcgccttctggatagccgctgccaaatgacgccgggttaatcgtccgtctaatgaaatttatgctcttctgacatactatgcgaaccaaagcaggttaacccggaggctatatggcaaatgaacacttaacgtcgtcccccataggcgagttcgttatgtttgccagcggtgatgggaaagtacgtgttgaatgccgctttgaaagcgatacgctttggctctcgcaggcaatgatttgcgaactctatggtaaagcgaaagccaccatcagcgagcatataaagcatatatttgaagaaggcgaacttgaggaaaattcagttgttcggttttaccgaacaactgccagtgatggaaaaaattatcaggttcaacactttagtttgcctctgatacttgccgttggctatcgcgttcgctcccctcgcggcactcagttccgccagtgggcaacccagacgctccaggagtatctgatcaaaggctttgtgatggacgatgagcggctgaaaaatccgcctgttggtacatcggctgtacccgattatttcgatgagatgctggagcgcatccgagatattcgcgccagcgaacgccgggtttatttgcgagtgcgggagatttttgcattagcggctgactatcaaccatcgctaaaagaaaccatgcagttttttcaaaccatccagaacaagttgcattttgcctgtaccggacataccgcggctgaactcattcatcagcgtgctgacgccagccaaccgcatatgggactgtccagctataaaggtgaagaggtgcataagggtgacgtgacggtggcaaaaaattatctcactcaggatgaggtcagcgaacttaatcgcgtggttaacatgtggctggattttgctgaggatcaggcccgtcgtcgtcgtcaggtctttttacgcgactggcaggataagctggatcagtttctgcaatttaacgaccgcgaggttctgcaaggtgcaggtaaagtgggtaagcaaatggcagatgaaaaagcgcaggcggaatatagtcagttttccgagcaacagcggcgtttaaaggaagccgagggtgagaaggatattgctgctttgctacagtggaaaacagagcctaaaaagtagcactgaggattccgattctcacgaataaaatcatttggctaaacctgttttatctgctgtgctcacctttctgccgggcggcgccttgcccggcctacgcgatccgggattatctttgggcctgtgtaattcccaccgagctgcgctgcatggcgtttagttagacaatcccagcttctgtgacagctcgctcagttcacgcatcgccgccaggcttttttgtttccgctgttccgcagccaccttctcctgcaccagctccgccaccctctctggctcctcagacgaaaccacccggcaatcgtctaatgcacaatattccctgaagcgctggcggaacttcatctcttctttttctctgaccagaccaaagccgcgtgtcagctggcgcgcgaccactatgcgcgtagcgatatcaatatcctctgaaggcagtagcaggatggagtacccggactgccgcacaagctgtcgattcccgacgacaatctccgggcagacatcggtggcaagaaatcccgatgagagcaccaccactcgtttttcatgcggattctccgccagcaggcgagagcatagcgcggcgttatcacgcacatagcgctcgtatccattgcgctgaatatattggcgaatatttaaaatctgctcgcaaaattctctatcgagatcgataaaccggtagctcatcgcctgcgcgagcagcgctccaaccgtgctttttcccaccccgccggggccaatcagaaatagcgtattcatctttattcctcgcgtccgtgtgaaagcattatgtcagcagaatacgccaaataattccgcggtcgcggccgttttttgttcacttccatctccccagccaattatttccatccaatgtttgcgttattcccttcacctttaaatccttacactaacgggataacgtggcttagaaaggagaccaatgatgacacccgaactcgaacacagcttctctatcaccattcaggtcgacaaaccggtcatcgtctcccgcagcccgcagagcgggaaacgtcagctgatcccaatcctgagcggaaccgtacgcggtgagcttaacggccacgtcttacccggcggcgtcgacagccagatcgtcgaacctgacggcacctgccgcctctccgcccgctatgcattacacgtggaagaaggcacggtatacatcgaaaacaacggcattcgccgcctacccgaagagtataaagaacggctattcggcgacgatatgcgcttttttagcgatattccgccggaagctatctattttcgtaccgtaccgacttttgaagtggatgcgccggcgctgcgctggctcaccacctcgctgtttatctgttccggcggccgcacgcaggacggcgtgatgctcgatttttatcgcgtccgctgattttcacgttttcaatataactgttatcgccgtcgggccatttttcccccgcgtgccgcggtctatcctcaatacattcaaacgatgaaccttattcaaaaccggagagtgtatgaaagcgatcgccattacccgcgcggcggcagaaggcagcaatattccttttttaaccgacatcgagctgccgcagccggttgccgaggggcatgacctgctggttgaagtgaaggctatttccgtcaacccggtggataccaaagtccgcgccgggtttaacgccgataccccgcgcgtgctgggctgggacgcggtgggcgtggtgaaagccgtcggcagcgcggtgacgctgttcgccgcaggagatgaagtgtggtacgccggcgcgctgggccgtccgggcagcaacagcgagtttcagttagtggatgagcgcatcgtcgcccgcaaaccacgttcgctggataatgccgccgccgccgcgctgccgctcaccgccattaccgcctgggagctgctgttccaccgtcttggcgtagaggaaggcggcaacgcgggtgacacgctgctgatcgtcggcgcggcgggcggcgtcggttcgatactgacccagctcgccagcaagctcaccggtatgacggtcattggtaccgcctcgcgtccggaaagccagaaatgggtacgggaagcgggcgcgcatcatgttatcgatcacagcaaaccgctcgccgaagagctggcgcggattggcgtcaaagcggtgacccacgtcgccagcctgaccaataccgaccagcactatccgcagctgatcgccgctctcgcaccgcagggcaagctggcgctcattgacgacccggaaaccctcgacgtggtgccgctgaaggcgaaaagcatctccctgcactgggaatttatgtttacccgctcgatgttcgcaacgccggacatgatcgcccagcatcagctgctgacccgcgtggccgcgctgattgacaacaacaccattaagaccaccctcggcgagcactacggtgccatcaccgccgccaacctgcaaaaagcgcacgcgcagctggaaaccgggcgttcggtgggcaaaatcgtgctggagggcttttaagatgagcggcgaggcgatttcacttctcgcggtgctgacggcgaaaccgggccacagcgacgcgctgcgccaggccctgcaggcgctgctgctgccgacgcgtcaggagccaggcaacctcgattacgccctgtttcagctgcgcgatgcgccggatacgttctatatgcgcgaatcctggcgcaatcaggaagcgctggacgcgcatatcgccctgccgcacttccaggattttattgcgcagatggatagcctgcttgccgggccgctgcggctggattatctgacgcccgtcgcgccctgatattttctgcactccgtttgcgggggtgagcctatctttaaccctttgagctctcccccacccatcgcgcctcaaccaggctacgcttgatcctgccgctcaaaaaacgctctccccctcctttttattcaacgccgttatgtagaagaggttttgctatgcagatcaacgctattggaacgaactcggccagccagccgttggggtctatggccatcacccgccgcgaaccggggccggacgatgtgcagatcgccattgattattgcggcgtctgccactcggatgtacaccaggcccgctccgagtgggcagggacgctctatccctgcgtgccgggccatgaaatcgtcggccgggtgaccgccgtaggcagccgggtctccggccacgccgttggcgatctggtgggcgtcggctgtatggtcgacagctgtaaagagtgcgaggagtgccgggacgggctggaaaactattgcgatcgtatggtgctcacctataacggcccgacgcaggacgcgcccggccacacgctcggcggttactcccagcagatcgttgtgcatcagcgctacgtgctgcgcgtccgccatcccaaagagcagctggccgccgtcgcgccgctgctgtgcgcgggcatcacgacttactcgccgctacgccactggaacgtcggaccgggcaaaaaagtcggcatcgtgggcattggcgggctggggcatatgggcatcaagttggcccacgccatgggcgcccacgtggtggcctttaccacctcggaatccaagcgtgacgcggcgcgggagctgggtgcggacgaagtggtggtctcgcgcaacgaaaacgaaatggccgcccacctgaagagcttcgacttcatactcaacaccgtggcggcaccgcataacctcgatgccttcaccaccctgctcaaacgcgacggcaccatgacgctggtgggcgcgcccgccacgccgcatccctcgccggaagtgtttaatctgatcttccgccgccggtcaattgccgggtcgatgatcggcggcatcccggaaacccaggagatgctcgatttctgcgccgagcacggtatcgtcgccgatatagagctgatacgcggcgaccagattaacgaggcctgggagcggatgattaaaggcgacgtgaaataccgcttcgtcatcgacagcgccacgctcggcggctaagccccgcgacgaaaagtgcgccgccactccgccgggctgacgccaaagcgcgctttaaactgctggcgccaggttacggcggagcgatagcccacttcctccgccacctgcccgaccggtaaatccccggcctccagcaggatctggctgcgccgcaggcgctcggcggccagccagtcggcgatgcccatgccggtcgctttggcgaaatggcgggtcagggtccggcggctcatcgccgcgacctgcgccagcgagtcgagattatgcggttcgcggatgtgctgctggagatactcaagcaggccgtttatccgcgcgtcgcgggtgtttttgggtaccggctgggcgataaactgcgcctggccgccctcacggtgcggcgggacgatcatccgccgggcgatctgattggcgacaaggctgccaaaacgctggcgaatgagatacaggcagcagtcgagcgccgccgcggtgcccgccgaggtaataatcccctcatcgtcaacgtacagcgcgttgatatccagccgcacctgcggaaactggcgctgaaaatcctgctcaaactcccagtgggtcgccgcgcgcctgtcgtccagcagcccggcgtagccgagtacaaacgccccgaggcacaggccgacgatctgcgcgccgttattgcgcgcgcgaaccaggccgtcaagcagcggctgcgatgggcgctgattcaccgccccccagtaaggcaccaccacgatatccgcctgcgccaggagggaaaaatcgccgctggcgttcagcgcgaagccgtcgcgggcgctgagcagccccggccgttcggcgcaaatatgcaggttaaagcgtttggtttccgagaccgtatcgccaaacagcatacagggcaccgagtagtgaaacgggctaaacccgtccaccgccacaatcgccacttccgtgagtttcatcgcccgctccgcttctaaaagaccatgctttccccatcctgcgggatgctgaccgcttcggcaatctgattgtcagccacgtactggcgcagctcatcgcggctcagcagacagtggttcaccgcttccatatggctggcgacgattttggcttccggcaggacgaagtgcgccttcagcacatcctctttgcccatgatgatcggcccaaaaccgatgacgtgcgcataccccgcattcagcaccaccacgtcagggcgcagcctgagcatgtcggcttccacttcatcgcgccagatagtgtcccccacaagccacagggttttctcctgcggatggcgcagcaccacgccgcaggcttcgcccaggcgctcggccattgccggcaccgcataggtgcggtcgctgccgtgctggcccgaggtggttttcaccagcgcaacgtcagcaaacgcgctgtcctcagagagcagacgaatatcgcgaaagccctggccgcgcagcagctgagcgtcggcgtcatgctggacataaaccggcagggttttggggatcgcggcgatcgccgcctcgtcccagtgatcctgatgagtgtgagtgacgataacggcatccacgtcaacgatcgtttcgatggaaaaaggcagttccaccagcgggttacgcaactcgctgcgcgcggtaccggcaaagcccgcccaggcgcctttgtcagaaagcatcgggtcaatgagaaactttttacccgcatattcaataagctgggtagcattacgcacatgggtgattttcatgatgttcattcctctttgcggttatctgctgaacatcgtacgtcccacaagcctggcgcaatatgggcgtttgggcaatgaacgatgaaatcgggccaatctgcgacggttgccatcggctcccggctatggtgtgctgaatgctcaactttgaggaacagtggctacgatgaaaaagaaactcacctccgccgatatgcacgatgtcgaggttctggcagacaccccatggttcagcatgcgcaaggtcggaattgatatggcccccggcgatcggcgggattttttctccattcactatcctcgcccggcggtgggaattgtggcgatgcaggatgacaaagtgctgctgattcgccactaccgttacctgatcgatcgggtggtgtgggcgattccttccggcggcgtcgatgaaggcgaagacccgcgcgaggcggccctgcgcgagctgcgggaagagaccggctggcaggcgcagcgcgccgacgaaattatccgctataacccctcctacggcagcagcgaccagctgtttattacctggctggcccacgatttgacctgggtgggaatggatgaagatcaggacgaagtgatggaaacgggctggtttaccctcgaagagataggccagctgatcgcccgcggcgagatgccggacgggctatcgctggtgccgctgctgcatctgatggcgcagcggcgcaccggtttagcgtagcggcttcagcatccgccagcggaaccacagctgagcgacgaggatcagcaggccgccgataattttctgcagcggtagctgttcgccgtaccacagcgcggcggcaatcaccgtgagcagcggttccagcaccataataatcgccgcgctggcgaccgccgcgtacttctgccccttcatttgcaggccgaagcgcaggctggtggcgataacgatgctggcgagcagccagccgaaggtcggcagggtaaacggctgagtccagctttcaacggcggcggagatccccagtccgacaatgccggtaatgccgagctgcacggtggtcagcgggatcagcggcacctcgcgggcgcttttgctggtgtagcaaaaccagatcgattgcaccagcgcggtcaacaggaaccagccctggctggggtgaaacgcaatcggcatatgcaggctgagtaagccgagaccgacaaccgcaatcggcaggcactcccagtaggcccgcgccggccgcgccttcatcatcacccatgcggtaagcggcacgaacagcatcgacaggctcataataaacgccccttcgcccagcgatggggtcgttgataccgagtagatccacaggcacaggtttagcgcaaaccacaggccgctgataatcatgcgcggccactgctgcctctcgacgcgaaggccgcggcagaaaggcagcagcagcagcgcggcgaataaaaaacgcaggccgaggaaagcgaaaaccggcatgccggcaatcgcttcccgggaaaaaatccatccgcaggcggcgataaccgtcgcggctatgagcagcaaatcagcctggcgttgccgggtcatcgccacgtctccttgtgtgagtgattaccagccgggcaccgcgccgccgttgaagatcgtctccgccgccttcgccacctcaggcgactggtaggagtggataaacgctttgacgttttccgcgtctttgttgtcttcgcgggtcacgatgatgttcacatagggcgagtttttatcttcaataaagataccgtcgcgcaccggggaaaggccggtctgctgcaggtaggtagtgctgatgatcgccacgtcgaccttcgggtcgtcgatgacgcgcggcagctgcgctccttccagctccataattttcaggtgatgcgggttgtcaatgatatcaaccgccgtcggcagcaggccggtgcccgctttgagggtaatcagcttttcctgctggagcagaagcagcgcgcggcccaggttggtcgggtcgttcggaatggcgatggtcgcgccgtctttcagctcggcgacggattttattttgcgcgagtagcccgccatcgggaagacgaaggtgttgcccaccgccaccaggcgatagttgtgggctttattatcctgttcgaggaacgggcgatgctgaaagacgttggcgtccagatcgccggcgttggtggactcattcggcagcagcgagccgctaaagcccaccagctccacgtcgaggccatatttctctttagccactttcttcgccacttccgccacatcctgttccgcgccgttaatgacgccgactttaatgtgtttcgcatcgctgcccttctggtcgcagcccgccagcagcaggcccgccagcatcacggcggcggctgtccgtaaacgcaatttcattgttatcaccccgtcagtccatagaaatcgttattattttttcgtctgaaactataacgactttgtgctggggttttaaacgcaaaaaccgcaaccggaaataaaatcatcttccccctttctcccgggggcggcgcgatgcgcctgcccgggctacgggttcaccgtcggctgcgatcgagtagcccggacaggtgcgcagcgccgcctccggggatctcttcaacggtgaggctcgttccgcagaacggcgccttacagccccagctcactcagccccgggtgatcgtccgggcgacggccctggggccagtgaaacagacgctcgctctccgtaatgggcagatcgttgatgcaggcgtagcgcgtctgcatcagtccgtgctcgtcgaattcccagttctcgttgccgtatgaacgaaaccagttgccgctgtcgtcgtgccactcataggcaaagcgtaccgcaatacggttatcgctccacgcccacagttccttaatcaaccggtactcctgctctttacgccatttgcgctgcaggaagtcgataatctgcgttctgccgtgaacaaattcgctgcggttacgccattcgctctcgacggtataggccagcgcgaccttagcggcatcgcggctgttccagccatcttcagcggcacggactttttgtgcggcgctctcgcgggtgaacggcggcagaggcggacgttgttcggtcatcatgaatctcctgtatgaatacccttcatacttcaagttgcttatgtgttggctacactcgttcaccccagtcacatagttatctatgctcctggggactcactcccttgccgcctttaagcaactcgaattattttgggtatataagctgctgcaggcgctgattttcccgctccagttcgtcaatacgctgttgcagcgtctggctatactccgccacctgccgggcggtgtagcggggggtaatatgctgcgggcagttccagtcaaaagcctgtaagtggaaacggtagatgcgctcaatccgggcccgatagttctccggcgcgacctgcgccagcagctgcgggtcggcatccaccgccacaacctctacggtggcgtagattttcagcctggcacggcgcgggtaatccatcaaaaacagacaggcccgatcgctgccgcgcaggttgccggtggtgatgtactggcgattaccggaaaaatccgccatcccaagggtggtttcatccagcagatgcagaaagcccaccgggccgccgcgatgctgaatatagggccagccggtttgcgaaagggtggccagatagaagctgtcgcgggtggcaatcatcgcctcctcgctggcgccgaagcgctcaccccggcgctggcgatgcggcgactgccacagctcatcgctgcccatttcatgctggacatccatcacgtccggcgtcatggcgatatcaagaaattctgctggcataggtcctcccgatgcgttgcggcataactcatcatggactgtgctggcagaaaagataatagtggcaatatgacaatcatctttccgtaaaacgggataattatggaccgactcagcgcgatggcgctgctggtgaaagtggccgaactcggcagcatgtcggctgcggcgcgggcgctgaatatgcccctgaccaccgttagccgccagattggcgaactggaaaataccctcggcgtgcgcctgatgatccgcaccacccgcaagctgacgctgaccgatgccggcgtcgattatgtcgccgccgcgcggcgcattctcgaagaggtggagaacgcagagcgccaggcggcgggcgaatatcaggagccaaaaggcgaactggttctctcggcgccgaccatgtttggccgtcagcatgttttgccggtggtgacggattttctcgcccgctacccgcagattcgcgtccgtttactgcttagcgaccgcaacgccgatctggtgggcgatcatattgatttagcggtgcgtatcggtacgctgccggacagcgggatggtggccacccggctgggcgagatgcgcattgtgacctgcgcgcacccggctttgctggaaaaacacggcatacccgaacgcccgcgcgagctggccgcgctaccgatcattcgtattgaatcgccaatgccttatcgcggctggcgctttaatgccgaagaggcggaggaccggctggtggcgctgcagccggtgctgtcgctgaccacgccggagagcgccgccgacgccgcccgcctgggggccggcgtggcgcgcctgctgcattaccaggcgatcgacggcctggcccgcggcgagctgaagctgctcctgcaggcgatggaaccagagcctgcaccggtgcacctgctgtacacctcgcgggatctggctccgcttaagctgcgtaaatttatcgatttcgccgcgccggctctgcgtcgggcgctgttgcgtattgccgccgccgtctagcgtgtgccggttttcagcggcgcttctttcagtagccaggagagggcaaatgccaccgccataatgcaggccgccatcagaaacgccgcatggatagcggacccgaaagcgtccagataatcgaggcggatctccgccgggagattctgcaccgccgccgggtttagcgccctcggcagctgcgccccttccggcagcaggcgctggagattgctttgcagcacgtgagtaaacaccgccccaaacagcgccacgccgatggaaccgccaatcgatcgaaacagcgtgaccccggaggtcgccacgccgtacatctgcgcgggcatcgcgttctgtaccgccagcaccagcacctgcatcaccagccccaggcccgcccccagcacgccggtaaacaggtacagctgccacatcgcggagtggatggtgatgcgcgtcagcagcaccatgccgacgacccccagcagggtgccgataatcggaaatacgcgatacttgccggtgcggctgataatgcgcccgctgacgatcgaggttagcagcaggccgcccatcagcgggatcagctgcaggcccgcctcggtgggcgtcgcctctttgaccacctgcaaatagagcggcaggaaggtcaccgagccgaacagcgccatgccgataacaaagccaatcaggctgcacagcaaaaagctgcggttgcggaataaggagagcggaataatcggctcgctggccagccgctcttcatgaataaagccgacgatcccgaccaggccaaacgccaggatgcaccacagctgcgggtcgctccacgcgcggacgctgccgccctcggaggtaaacaggatgatgcacagcagcgccatgctgaggtaaatcgcccccagccagtcgatctggtgctggctgcgcttgttgctgctgtgaaaaaccgcgccgatcaccagcagcgcaaacagccccagcggcaggttgatgtaaaaaatccagcgccaggaggcgtgctgcaccaggaagccgccgattaacggcccgattaccgtcgccaggccaaagacgccgccgaacatgccctgatagcggccgcgattcgccggcgggatgacgtcagccaccgccgccatgctgatcaccatcaggccgccgccgcccagcccctgcaggccgcgcatcagcaccagctgggtcatattttgcgccagcccgcagagggcggaaccggcaagaaacagcacaatcgccacctgcagaacgattttgcgcccgaacagatcgccgaatttgccgtacagcggcaccgcgatggtcgaactgaggatgtaggcggtgaccacccaggagagcttatccagcccgccgagctcgccgacgatggtcggcagcgcggtggaaacgatagtctgatccagcgccgagagcagcatcaccagcagcagggcgctgaagagcaggcggatcgagggcaccgccggttggctggcgatttcagatgtcatagcatcactcgcttgaaattaattaaatgcataattaatatttagggaaatgatgaatctggtcaagggatcgccacaggatgtcagcacaaaaagacaacgaagccccgcgtcgtcccggtcgcccgcgcgggcagaaatccggctccgccaaccgcgaacagctgatggatattgccctggcgctgtttgcccgccacgggatcgcccgcatttcgctgaacgccatcgccaaagaggcgggggtaacgcccgcgatgctgcactactacttcagctcgcgcgaagcgctggtggaaaagctggtcgaagagcgctttatgccgctacgcagcgagatcggacaaatttttgtcgcgcacggcgacgatccggtcaccgcttttacgctgcttattgaaaccctggcggccatggcggagaaaaacgcgtggttcgcgccgctgtggatgcaggagatcatcggcgagatgccggtgctgcgccagcatatgcacgcgcgttttggcgatgagaagtaccacaagatgctggagacggtgcgccgctggcagcgggagggcaagcttaatccggcgctctccccggagctgctgtttaccaccctgataagcctggtgctggtgccgttttcccgcacccacaccgatccgcggttgcaatcggtagaccggaagatgattgtcagccacgccctggcgctgacaggccgggggatcggcggctaattcccccggctcgcgctgtgcttagccgggctacaggttcacagccgtctgcaatccggggaatacaatccggttcacaaccgcctgcgatcgggtagcccggataaggcgacagccgctatccgggggattcaatccgcttcacagccgcctgcgttcgggtagcccggacaggcgcacagcgccgcctccgggagggtctcctgaggccaggtttacaatgctttcgataaatagtggcgctgcatgcccacgtgcggaaaacccggcagcgacatctgcagctgatagcccagcttctgataaaacggcagcgcctgaaagctgaacgtatccaccagcacgtggctgcagccgcgcgcccgcgcctggttttccgcttcatgcatcagctcgctgccaaggccgctgccgcgcgaggcttcgctgacccacagatattcaatacacagccagctgcccttgcgtttaccgatcaatccgccgcgcatcgcgccagcgtcatcgcgtgaataaacgcccagctcgccgaactgagccgggtccagaaagcgcagattgtattcccgcagtcccgccagcagctcttcttgatcggcgggattaatgttctctgttattattaatgtcattgattatctccatcttttatttttcacagaccattcaccaccctactttcacaaaatatcctttttttctccattatttcctgactaaattccctgcactaaattttgtgtaaaaaaccttcccatcattcggtacagacgtataatggggaaaaatgagaacgatcattctcaaaaccaaaaaccatggagaaccccacaagtaatgccctgtagcaggcgttatcgctcggttcagagcctgtaaccgccgtctgatgccgtattcgccgcacgggaaaatctcggaaaaaccgcttaatcaatagcggtattcaccgagttatttactgcaaacaggaatatttatttcccattgggttatttgtgcttgcccggagatgcatcatcgcccggcccatcaccccgccactgaatttgcggggcggacgtcgttcatcctgagaaaatataatgaaatatactttagcccccatcgcagcagcattatttctccttagcgggtgcgataatgcgcaaaacgcttccccgcagcagatgacgcaggaagtgggtgtcgttaccctgcacggccagcctgtcccggtggtgagcagcctgaccggacgcaccaccgcctcgcttagcgccgaagtgcgcccgcaggtcggcgggatcgtgcaaaaacgcctgtttaccgagggcgatatggtcaaagccggacaggcgctgtaccaaatcgacccatcaagctatcgcgcgacgtttaacgaagccgccgcatcgctgaaacaggcccaggcgctggtcatcgccgattgccaaaaagcccagcgctacgcggtgctggtcaaagataacggcgtctcccgtcaggacgccgatgacgcgatagcgacctgtaaccaggataaggccagcgtcgagtcgaaaaaagcggcgctggaaagcgcgcgcatcaatctgaactggaccaccgtgaccgcaccgattgccgggcgcatcgggatctcttccgtcacgccgggcgcgctggtgtccgccgatcaggataccgcgctggcgacgatccgcggcctggatacgatgtacgtcgatctcacccgatccagcgtcgatctgctgcgcctgcgtaagcaaagcctggcgagcaacagcgatacccttaacgtcaccctgactcttgaagatggcagcacctacagcgaaaaaggtcgcctggcgctgaccgaagtggcggtggatgaatcgaccggctcggtcacgctgcgcgcggtctttcccaatccgcagcacgtgctgctgccggggatgttcgttcgcgcccgcatagacgaaggcatcatgaacgatgcgatcctcgccccgcagcagggcatcacccgcgatgccaaaggcgatgccaccgcgctggtggttgacgctaataacaaggttgaacagcgcagcgtggaaaccggcgaaacctacggcgacaaatggcttatcgtcaacggcctgaagagcggcgacaggttgattgtcgaagggaccggcaaagtggcgccgggccagcaggtcaaagccgccgaagtcaaaaatgacggaggcaacgcctgatgttctcccgtttcttcgtgcgacgcccggtcttcgcctgggttatcgccattctgattatgctcgccgggattctggctatccgcaccctgccggtcgcccagtatcctgacgtcgccccgccggcgataaaaatctccgccacctacaccggggcctctgcggaaaccctggaaaacagcgtcacccaggttattgagcagcagctcaccgggctggacaacctgctctactttacatccaccagcagctccgacggctcggtcagcattaccgtcacctttgagcagggtaccgatccggataccgcccaggttcaggtacagaacaaagtgcagcaggcggaatctcgtctgccgagcgaagttcagcagtccggcgtaacggtggagaaatcgcagagcagcttcctgctgatcctcgcggtgtatgacaaaaacaacaaagccaccagctccgatatctccgactggctggtcagcaacatgcaggatccgatggcgcgtattgaaggcgtcggcagcctgcaggtgtttggcgcggaatacgccatgcgcatctggatggacccgaccaaactggcctcctattcgctgatgccatccgatgtgcaatcggccattgaggcgcagaacgtgcaggtgtccgccggtaaaatcggcgcgctacccgcctccaacgcgcagcagctgaccgccaccgtgcgtgcccagtcgcggctgcaaaccgtcgcccagttcaaagagattatcgtcaagagcaagagcgacggttcggtggtgcgcctgagcgacgtcgcccgcgttgagatgggcagcgaagattacaccgcctccgccaatctcaacggccatccggctgccgggatcgcggtgatgatggcgccgggcgctaacgccctgaataccgcgacgctggtgaaaaacaagattgccgagttccagcgtcagatgccgcagggttacgatatcgcctatccgaaagacagcaccgaattcatcaaaatctcggtggaggatgtgattcagacgctgttcgaggcgattatcctcgtagtctgcgtgatgtatctgttcctgcaaaacttccgcgccacgctgatcccggcggtggcggttccggtcgtgctgctgggcaccttcggcgtgctggcgctgttcggctactccatcaacaccctgacgctgtttgcgatggtgctggcgataggcctgctggtggatgacgccatcgtggtggtggaaaacgtcgagcgtatcatgcgcgacgaggggctgcccgcccgcgaagccaccgaaaaatcgatgggcgaaatctccggcgcgctgatcgccattgccctggtgctctcggcagtgttcctgccgatggccttcttcggcggctcaaccggggtgatttatcgccagttctcggtgaccattatctcggcgatgatgctctccgtggtggtcgccttaaccttaaccccggcgctgtgcggcgcgctgctgagccattctaaaccgcataccaaaggcttcttcggcgcctttaaccgcctgtggggacgcaccgagcagggctatcagcatcgtgttgttggcggcctgcgccgctcggcgatgatgatgggcgcttttgtcctgatttgcggcggcatggcgctggcgatgtggaaactgccgggcagcttcctgccgacggaggatcagggcgaaatcatggtccagtacacgctgcccgccggggcgacggcggtacgtaccgccgaggttcgccgccaggtcaccgactggttcctgacgaaagagaaagccaataccgacgtgatctttaccgtcgacggctttagctttagcggcagcggacaaaacgccgggatggccttcgtgtcgctgaaaaactggtccgaacgtaaaggcgaagaaaataccgctcaggccatcgccctgcgcgccaccaaagagctcggcggcattcgcgacgccaccctgttcgccatgaccccgccgtcggtagatggcctggggcagagcaacggcttcaccttcgaactgttggccagcggcggtaccgatcgcgatagcctgatgaaaatgcgcagccagctgctggccgcggcgaatcaaagtaccgagctgcaatcggtgcgcgccaacgatctgccgcaaatgccgcagctgcaggtggatatcgataataacaaagccgtgtcgctcgggctgtcgttaagcgatgtcaccgataccctttccagcgcctggggggggacctacgttaacgactttatcgatcgcggtcgcgtgaagaaggtctatatccagggcgaaagcgacgcccgcgccgtgccgtccgacctcggtaaatggtttgtacgcggcagcgacgacagcatgacgccgttctccgccttcgccaccacccgctggcaatacggtccggaaagcctggtgcgctacaacggttccgccgcctttgaaatccagggtgagaacgccagcggcttcagctccggcgcggcaatggacaagatggaggccttagccaataacctgcccgccggtaccacctgggcgtggagcggcatgtcgctgcaggaaaaactcgccagcggccaggcgatgagcctctacgctatctcgattctggtggtcttcctgtgcctcgcggcgctgtatgagagctggtcggtaccgttctcggtgatcatggtgatcccgcttgggctgctcggcgcggcgctggcggcgtggatgcgcggtctgagcaatgacgtttacttccaggtggcgctattaaccaccatcggcctgtcgtcgaagaacgccattctgatcgtcgaattcgctgaatcggcggtggaagagggctactccctgtcgcgtgccgccatgcgcgccgcgcagacccgtctacgccctattgtgatgacctcgctggcgtttatagccggggtgctgccgctggcgatcgccaccggagccggggccaacagccgcgtggcgatcggtaccggaattatcggcggcaccctgaccgcgacgctgctggcggtgttcttcgtgccgctgttctttgtgctggtgaaacgtttcttcacccgccatcgttcttctcaggagtaagttatgtttcgttttaccttagtttttgttgcgctcctgacggcgggctgcgtctctctcgacccgcactatgaacgtccggccgcacctgtcccggcgaccctgccgggtagccacggcgaggcaaccgcggtagtcagcgactggcagcaggtagtgaatgacgctcgcctcaaaaaagtggtgaacatcgccttgaccagcaaccgcgacgtgcagaaagcgctggccgatatcgaagccgcgcgcgcccagtttggcgaaacccgcgcctcgctgtttccgaccctcgacgccgagctgagccatacccgcagtaaaacggtggccagcggcctcacctcgtcagcggaagccaacggcgcggtttccagcttcgagctggatctgtttggcaagaaccaaagcctgacgcgcgcggcgcgggaaacctggcttgccagcgaattcaccgcccagaatacgcgtctgacgatgatcgccgatctgaccaccgcgtggataacgctcgccgcggacaacagcaatctggcgctggcgcaggacaccatggccagcgcggagaactcgcgccgcatcgtcacccgccagatggaagtcggcaccgcctcggcaggcgacctgagcgatgccgaaagcgtttatcagcaggcgcgcgccagcgtcgccagctaccgcacgctggtggcgcaggataaaaacgctctcaacctgctggccggagaaaccgtgccggatagcctgctgcccggcacgctggaaagccttggcgatcggagtatcaccctggtgccggcgggcgtctcttcatcggtactactgcgccgcccggatatccaggaagcggagcataatctgaagagcgctaacgccgatatcggcgcggcgcgggccaatttcttcccgtccatctcgctgaccgccagcgccggggtcggcagcgactcgctctcgtcgctgttcagccacggcatgcaggtgtggtcattcgcgccgtccatcagcctgccgctgtttaccggcggcagcaacctggcgcagctgcgctatgctgaagcggagaaaaaggggctgatcgccacctatgagaagacgattcagagcgcctttaaggatgtcgccgacgcgctggcgcgccgggaaacgctcagcgaacagctggacgcgcagaataaatacgtcgcggcggagcagaaatcgttgaatatcgcgatgaagagctatcaggccggggtcggagattatctgtcggtgctgaccgcccagcgaacgctgtggtcggcgcaggccacgcttatctccctccagcaaacggatctggaaaaccgcattaccctctggcagtcgctgggaggcggcgccagctaacgcttttgccgggcggcaacgcccggtttgatgacaaggagcccgttgatatgtcccgaatttccctctcctgggtcgtggttctcggtttgctcagcgccattgggccgctgtgtaccgacttctatctgcccgcgctgccggaaatcacccagcagctcagcgccaccggcacgcagactcagctttcgctgaccgcggcgctgattggcctcggccttggacagctgttttttggcccgctgagcgaccgcattggccgtaaaaagccgctggcgctctccctgctgctgtttatcttctcctcggcgatgtgcgcgataacctacgatatccatatgctgatcgcctggcgctttctgcagggcttcgccggcgcgggcggctcggtgctgtcgcgctccatcgcccgcgacaggtatcagggtacgctgctgacccagtttttcgccctgctgatgaccgttaacggcattgcgccggtgctttcaccggtactcggcggctggatcatcaccgccttcgactggcgtatcctcttctgggcgatggcggcgatcggcgttgtcttgctgctgctcagcctgacggtgctgcacgaaacgctgccggccaaaagcgccgcctcggctacgcggcaacaggctgatgcgccggtgctgaaaaaccgccgctttatgcgctactgcctgattcaggcctttatgatggccgggctgttttcgtatatcggctcgtcttcgttcgttatccagagcgaatatgccatgagcgcgatgcagttcagcctgctgttcggccttaacggtatcgggctgattatcgcggcgctgatcttttcccgcctggcgcgccgcttcagcgccgaagccctgctgcgcggcggccagctgctggcggtggcgtttgccgctatcaccctgctcttcgcctggctaccgcagccgacgctggcgctggtcggcctgttctttaccgtttccatgatgagcggtatcagtaccgttgccggctcggaagcgatgaacgccattcacgcccgccagtccggcaccgcttccgccctgatgggcacgctgatgtttgtgttcggcggtattgccgcgccgctggccggactcggcggcgaaacgatgctcaaaatgagcttcgcgatgaccctttgctatctggccgcgctgctgattggcctgaaaaagccgcgccccatcgcataacctcctccggggtaataaaatattccaattatattacccctatttttcccgtcagtactgtaatctcctattattccttcaacaccaatcgtgataaccttcacaggaaaggaataattaattccttatactgcccgccaccgtgaataaagaggttcctatgagtatcgacctgagcaaactgctgaccgagcgccgcaacgccaatagcgccaacattgatatcctcaccaccgaagagatgctgacggtgattaaccaggaagaccagcaggtggctcacgccatcaccccctatctgccgcaaattgcccaggtggtggataaggtcgcggcggcgctgcaggcgggtggtcgactgatttacattggcgcgggcacttccgggcgtctggggatccttgatgccagcgagtgtccgccgaccttcggcacccgcccggagcaggtggtgggcattatcgcgggcggccataaagccatactgagcgccgtagagaacgtcgaagacaacaaagcgcaaggggcgatggacctgcagaacctgaactttagcagccgcgacgtgctggttggcttggccgccagcggacgcacgccgtacgtcatcggcgcgatggagtatgcccacagccagaacgcttttgtcgccatcgtcagctgtaacccgcacggcgaaatggcccagctggcggacgtcgccattacgccggtcgtgggtccggaagtggtgaccggctcaacgcgcctgaaggcgggcaccgcgcagaagctggtgctgaatatgatttctaccggggcgatgatccgcatcggcaaggtctacagcaacctgatggtggacgtggaagcgaccaacgccaagcttatcgagcgccaggtgtccatcgtcatggaagcgaccgaatgcgatcgcgcaaccgcccagagcgcgctggaagcctgcgatcgccactgcaaaacggcgattgtgatggtgctggctgatttaagcgccgcggatgcccaggcgctgctggcaaaaaataacggctatatccgcaaggcgctgagccactcctgaccgctgactcacgggtaatctgcaatggcaaaaataaataaagagatgatagcgcggatcctgcagcacgttggcggagccgggaacgtcgcgctggcgggcaactgtatgacccggctgcgcctgaccctgcgcgatgaatcacgggccgatagcgccgccatccgccagattgacggcgtaatgggggtgatcgttagcgatgaacagttccaggtcgtccttgggcccggcaaggcgcaaagcgcggcggaaatgatgaatgcgttactggaagaagccccggcggatgcgccatcgctggccgatgtcgccgccgaaaagaaacaggcgctgaagagcaagcaaaccagcggtattcaaaaattcctcgcgaaattcgccaccatcttcaccccgcttattcccggctttatcgccgtcggcctgctgttggggttcgcgaccctggcggagcagatatttgtcctcgaaaacgcgcatccgaacgcgacattgatggcgctgatcggctacatgaaggtgttcagcaaagggatgtttaccttcctgagcatcctgatcggctataacgcccagaaagccttcggcggctccggggtcaacggggccatcatcgctgcgctgtttgttctcggctataacccggaagccaccagcggcttctattccgggatttccaccttcttcggccacggtatcgacccgcgcggcaatattatcggcgtgcttatcgccgcgattatcggcgcgtgggtggaacgacaggtacgccgcatcatgcctgccaacctcgatatgatcctcacctcggcggtgacgctgctgatcatgggcgcgatcacctttaccgtcattatgcctatcggcggctggctgttcaccgggatgtcatggctgtttctgcaccttaacggtaacccgttcggctctgcggtactggccggcctgttcctgctggcggtgatgttcggcgtccatcagggcttcgtgccggtctatttcgcgctggtggatgcccaggggtttaactcgctgtttccgattctggccatggccggtgccggacaggttggtgcggcgctggcgctgttctggcgggcgaagcacggttctctgctgcgcacgcagattaaaggggcgattattcccggctttctcggcatcggcgaaccgctgatttacggcgtgacgctaccgcgcatgaagccctttatcaccgcctgcctcggcggcgcctgcggcggttttttcctcgggctcatcgcctggctggggctaccggtcggcctgaatacggtatttggcccgtccgggctggtggcgctgccgctgatgacctccggcagcggcatctacgccggaatggcggtgtatgccgccggactggcggtctcttacctgtgcggctttgccctgacctggctgttcggcagtaaaaacgttgatttgagctaagaggcgcgtccggcgcataaaaattgaatcttttttaacccgccgaatggcgggtttatttatttctgtgtaatctacacgtgtagattacacaggagatgccctatgccagccgcaaaacgcaataagcagaacgtcagcgtgacactggacccaggcctggtcaaacaggctcgtgaggtcggcatcaatctgtctctaacgttgactaacgctctaaaaagcgaaatccacagcctcgaaatagcccgctggcaaaaagaaaatgcccaggcaatcgactacctcaataatttaactgaggaaaatggacttctctctgatgaatacaggacgttctaaatatgcagtattacgtttataagaatacaggtcgaattgctgcgtatccttacctccttgatgtacagagtgacattatcggcaagcgcaatactcgggtcgtgattccactgtttccactgaaaaactataaaggtccacgcgccgatcgtttaacaccgcttgtcaccgtagaaggggaagaatacgtcgtgatgactcacgaactcgccagcatcccacatcgtgttctgggtgaagaagtttgtaatctgaatcaccagcgcgaagtcgttaaagcttcaatggattttcttttcgacgggatctaactcgctacaagcttacgcgtcagatcgccaaacccaacgatcttccgctgcaaggggcacgcaaatactccgactaccctttcctgccccgcttcccgcgcgtactcatgctatgatactgctttcgcattattttcacctgagggaaagatgggctccagcaaaaaagggatgctgaacgtactgatcgccgccgtgctgtggggcagctcgggcgtctgcgcgcaatatattatgcagcaaagccagatgtcatcgccgtttctgaccatgacgcgcctgctgttcgccggcctgatccttctgatgctctcgttcttccacggcgataagattttccgcgtcctgcaaaaccgcaaagacgccgccagcctgctgatcttttcgctgttcggcgcgctcaccgtgcagtacacctttctgatgactatcgagcaatccaacgccgccaccgcgacggtgctgcagtttctgtcgccgacgattatcgtcgcctggtttgccatcgcccgcaaaacgcgccccagcccgctggtgctcgcggccatcgccacctcgctggcgggcactttcctgctggtgacccacggcaacccgacgacgctgtcgatttcccccacggcgctgttctgggggattgcttcggcgtttgccgccgctttttatacaacttatccttcgacgctgattgcccgctacggcacgctgccgattgtcggctggagcatgctgctcggcggcgccatgctgctgccgttctacgccggacagggcaaccattttgtggtgaccggcggcctgctgctggcctttttctacctggtggtaatcggcacctcgctgaccttcagcctctacctgaacggcgcgcagaagattggcggcgcgaaggcggggatcctcagctgcgcggagccgctgagtagcgccctgctctccctgctgctgctcggcatcacttttactctcccggactggctgggcacgctgctgattctctcatcggtggtgctgatcgccatggattcgcggcggcgggttaaaacggcctgacgattatcggccaggagaggctgcgacctgagtttgcagcatcttcaggtcgtcatccgacagctcacaaaccacctgcaccagctcgcactcaaatccctgttccagacatgaacgagcaatacgcaacgcctcttctcgtttaccttcctgaaatccttcataaaactccaggtataattccaacagatatcccagtaaatactcaggttgtaactcctgtggtatctcttccagcggtagcctctctacaatctttattaattttcccccatcttgagggatgcatcctggaatgcattcagatcgtcatcagagagcccaatagtcatccgtaccagctcgcgctcaaacccctgctccagaagtgaacgggcaatacgcaacgcttcttcttgtctaccctcttgtttaccttctaacttgccctccaacttgccctccaacttgccctccaacttgccctccaacttgccttcttgtctcccttcctgccgtagcctttccgcaatcgtcatgagtacctccttatgttgaggaacgcgccgctcgacctcgtgaagaaattcaccaaagtgaggcgcatcgccgcactgcagcatgtaattaaacagcgctttcagttggctgtcattagcgcaacctttaaccaacagctcggctaatcgctccaccaggccaagtaaatcgcgctggcgaatatgcttttgaatcagctccagcagcgccacgcgccggtgctgcataatgtcgtcatccggaaccaccgtaatatccaccagcgggaaagcggcggcataaagtcttcgcgccgtctgcgtatcagtaaactcatccagccagcaaagcgagaagggatagggacttttcgcgccgtgatagaacagcatcggcaccaccagcggcagcgttttatgcccggcatccaggtgacgctgcatcgccgccagcgcgtagcgcatcagcctgaaggccatatgcgcatccggcgtgctctggtgttcaatcaccacgtaaatatagccgtcgccgtcgcgggttttcagcgaccacagcacgtcggagtagctggcacgcaaatctgcctcaataaagctgccggactccagcctgagcgtttgcagattacacagctggcgtagcgaagcgggcagatgaatctcgataaaatccctggcgcactcgggatgcgataaaaactgtttaaataccgcatcgtgcggcgtcgagggggttcctttttgcgtcatgatccgccatccctgaaacgtaatggctggaatatatccgtcccaaaaagcgcaaacacctgcgcatcaacggctttgcttgccggtacgaaagataaatttcagcggctgaaacagactcattcttatggaaaccagcgcgcaaaatgttgattcaggaatgcgtctatagttagaggaaccctttaataaaaataaggatatccgtgatgaagagaatgagttttgcgctttcgctggcagccagcctgatgttctccagcgtggcgacagccgcaccgctctccggactgaagtttgaacagcaaaagcagcagatagtgaaagatgtgaggaaaaattgccctgccagcagcgcgctggatgatacgcagtttgctaaccgcgtgctggaatcagcggaaaataagaccgccgtacaaagcgcgacgcgggcgctggataaaaacaacagcgccgcttatcagaaggccattagcggcattcagtgccctacgccctagtaccgggcgcggagacgtcaccattagcggttcggaatgatcaaatctccgcgcagcgggctgctggcgagcatttgcgtcttctcggtcagccagttgactatctggctggccatcgcgtccatggaatattcaatcgccggaatcgtcggaataccgggcagctgtaacgagcccgccaggctgaacaccatgactttttccggtaccgcgcgattaaacgcctggagctgcggcaccaccagctgcgcctgctgctcgttggcaaccaataacgcattaaaattcagggtggttgcgttgttcaccagttcctgaaccgccacggacggcgaatggctgtcgagaaaaaccaggttgcgattgaacggcagaaaattcttttccagcgcgtgcttatagcccagcagaacctggtcagcaaatccgctggcctgaggatgaatcagcgcaatctgccgccgcccctggcttatcagatagttgcaggccgtttccgccgcaaaggcgtggtcaaactgaatgctattcgttgcgtcgctttccaggcagtcaatcagcactacgtcgggccggtcgatattgagcggaaaccgcgcgccgatgattaacacattatcgcagaggccgcaggtcaactcttccagcgaatggagcactctgccgcggctgttggcaaaacgcagcagcaggtgcatctggtgctggctgagctgtttttccagcgcgtagagatagctggtggtttgattaatgttgtcctgggcgcaaatgacgccgatgcagccggtggtctgactcagcaaagattgcgcgatcatattcggccggtagttaagcgcttccgccgcctgcaataccgcctgtcggctggcttcctttacgccgcgcgaaccactcaacacccgagagactgtggctttagataccccagctaaccgtgatacatcgttgattgtagacattattttcccctgacagggccagtccgatccctgtaaatccttgaacctgaatcgcttcaataataaccagcggcagtatatccgtttccctttttatttggaaaccgattttccgtttcatggaaaatcgtagcaaaaactaggaaaatttgtgagccaaatctaattaacacgccctttgactgacagatcttgacggttatcacagttctgttttttataaatggaaaccggtttccgtctgatatcaaatcatccacgcaataactttttacattttgaggacaatcgtcgatgtacaagattatgctgtgctgctctgccggaatgtccaccagcctgttggtcagaaagatggttgatgccgcgaaggaacgtaacctgccggtgcagattgacgcctacggagtttccgaatttgacatgcagtttccgcaataccaggtggtgcttcttgggccacaggtgaaatacatgctgaaaaacttagctgagaaagccgctcccctgaatattccggtccagccgattaacgccatggattacggaatgcagcggggagacaacgtcctggattatgccctgtcgctgattgaagcgcattaagaggtgtgcaaatgagttctctgtatcagtccatgattgccgcgatcgagcaatcaattaccccgctggcaggacgccttgggcagcagaaatacgttatcgcgattcgcgatggtttcactgccgcattgccgtttatgatcatcggctcattcatgctggtatttatctttccgcctttttccccggataccactaacggtttcgcccgcggctggctggacttctcccagcagtatcgcgaacagctgatgctgccgtttaacctcagcatgggcgtgatgacgttctttatttcggtggggatcggcgccagcctgggacgccagttccagctcgacccggtgatgtccggtctgctggcgtttatggctttcttactggttgccgcgccgtacgccgatggcaaaatctccacccagtacctctctggtcagggtatttttaccgccttgatcaccgccatctattccacccgcgtttacgcctggctaaagcagaacaacattacgattcgcctgccgaaagaagtgccgaccggcgttgcgcgttcgtttgaaatccttatcccggtgctggtggtgatcgcgaccctgcatccgctgaatctgtttatcgaagcgcagaccggtatgatcctgccgcaggcgattatgcatctgctggagcctctggtttccgcctctgactccctgccggcgattctgctttccgtcctgatgtgccagatcttctggttcgccgggatccacggctcgctgatcgtgaccggcattatgaaccccttctggatggccaacctgtcggcgaaccaggcagcgctggcggccggtgcggctctgccgcatgtctatctgcagggtttctgggaccactacctgctgattggcggcgtcggctccacgcttccgctggcgttcctgctgctgcgtagccgcgtcacccacctgcgcaccattggcaaaatgggtatcgtaccgagcttctttaatatcaatgaaccgattctgttcggcgcgccgattatcatgaacccgatgatgtttatcccgttcgtctttgtgccgatgattaacgccgttctggcttacggggcgacgcgcctcggctggctcagccaggtcgtttcgctgacgccgtggacgacgccggcgcctatcggcgcatcatgggctgcaaactggacgctaagcccggtggtgatgtgtttaatttgcatggtgatgtcggcggtaatctacctgcccttcctgcgcgcctatgaacgctcgttaatgaaaactgaagttgaaaaagcaaaagccgcagtgccggttgccgaaacggtcagccaataattaatctctatatttaatattatatttaaaatgacggcataaataatgcggaaaagggactttcactgcattatttaaagaataaagttaatgacctcaggatctatcatgattgaattagaagatgcggtaatggaaattatcgttaatgcgggccagtcacgctcattatgttttgaagcgctccattgcgcccgcaacggtaatatagatgaagcgcgcttgcttctgaatgaagccgatggctatgcccgccgggcgcaccagatgcagacccggcttatcgagcaggacgctggcgaagcgcgccagccgatgacgttaattatggtccatgctcaggatcacttaatgaattcactgctcgcccgtgaattttcggaagagttaattcatttataccagcgttaatttatatcaatatttagcaactgtacccgaactaaatataccagcttatcctggcgggatagctattatctaaatatatccgtcatatttcaagctgcatgtacgttggctgcgctcgcttacccgaatcacttaccaaagtaagctcatcgggattcactcccttgccgccttcctgcaactcgaactatttaggatatatataaattattaaaagcgagataatgatgaaaactgtaaaaatgctgccattaaccatggcggtcgtcgccgcgctgtgcccaatttccgtattcgcacaagaatttactcaggaacagatcgacgccattgtggcgaaagccgtcgataaagccctggccgaacgccaggcgaaaatcgacgccgcggctgataaaaaagtggatgttatcaccaacccgcagaccaccgcggccacgccggatatggcgatccccttcggcctgaagttcagcggctacgcccgctacggcgcgcagttccagaccggcgatcagaagtttgtcggcgtggatggctcctataacggcgcttcggcgatcggccgtttaggcaacgaaggcaacggcggcgaattccagataactaaagccttcaagagcagtaaaggcgcgatctgggatatcaacgtcatgtttgaccactggagcgatgaagttaacctgaaaaaagcctacgtcggcgtcaccaacgtgctggagtctaaccccaacgcctatatctgggccggccgcgacttccatcagcgcccgcagcaggggatcaacgactacttctggatgaaccacgacggccagggcgccggggtgaagaactttgatatcggcggcgtgcagtttgacgtggcgggagtgtcgcaggtggagtcctgtagcccggaagtgatggcggacgaggccaacccgtcgcgcatcacctgtaccggcggctccggtaccgggcgataacggccactacgccctgaccaccaaaacccacaacatcaaggccgggccgatcgacgttgaggtgtacgccaactacggtttcgattcgaaagcggtggacagcgacgaacgtctcgacgcctggcagggcgggctggtgctgagccacaccaacgacagcggcgtcaataaagtgatcctgcgctactccgataactcggataacagcgtctacaacaaaaccgatgacctgaccgcgatttacgccagctttgaagggctgcataaatttacccggcaggcgcagatcgaatatctgctggccttccacgactatgacaacggcaaggacaacaccgataaccgtaaaaactacggcgccattgtccgtccgatgtacttctggaacgatgtgcactccacctggctggaagcgggctaccagcgcgtcgattacgaccagggcggcgataaccacggctggaagctgacgctgtcgcagaacatcgccatcggtatggggccggagttccgcccgatgctgcgcttctacgtgaccggcggccaggtggataacaagcgcaccgcgaaggttaacggcaccaaagacgagcagctggattcgttaaaccttggcggtatgtttgaggcgtggttctaagagagtgaaatcgccccgggtcgcggtgtcagagcccgatccgggctatcagatcgtaacctgtagcccggctaagcgcagcgcgagccgggaagaagccgcatcgatatattcatcccggcgcattccccgggttgcggcgtaacgccttaccccggctaccactggcttaggtggtttgcaaaaggagccggagatcacctctggctcatccggcgagcgatgcgttcaagcttaatcatcagcagcagcgtgacgcccaccagcacgatggtcagcgccgaaccatcggcaatattgccgcgatcggtcaggctgaaaatcgtcaccggcagcgttgtccagcccggcgggtaaatcatcaccgtcgcgcccagctcccccatcgacagcgacaggcttaacgccagtgctgaaatcatccacggcgtcatcagcggcagcgtaacgtagcgcaggcgataccacggcgatgccccgaggctggaggcgacgttttcaatatcggcggaaatccgcgccagaccggtggaaacgttgctgaaggtaaacgcggaaatcagcacgaagtgcgccgccagaacgatccaaaaggtgccgttcatctgcagcggtccctggctgaaggccaccagaatgccaagacccacagaaacggatgggatggcgcttggcagatagaacatcagcccaaggtatttttgcagcttcgcaccgtactgccgcagggacagcgcagcccacatgccgcacagcagagcgaacaggctggcgcaaaacccgaccatcaggctggaaaagagcgcatcccacgcggcgccgcgaaacgcgttaacaaagtgtccgaaggtaaagccggacggcagcaggccgttccactgctggctcaggctggacatcaaaatcaccgccagcggcaggaagaaaaacccggcaaacagcgtcaccgccagcgctcccgccgccgtacggcctttacgcgaccaaatcaacatcgttagctcctcacgccggtacgcgcggcggccagccgatagagcataaacagccccagcgacagcagaatattaatcagcgcaatcatgcaggcgacgctgtagtccgactcgagaatagccttgctgtagaccatcatcggtagagtatttacccctttggcgccgataaacagcacgatgccgaactcgttggtggtcaacagcagacacaggctgccgcccgccattagcgccggcagcaccgccggaaaaatcacctggccgatgacccgcagcggatgcgcgccgaggatgctcgccgcttcaagctggcttttatcaatctgccgcagcccggccatcagcgggcgcatcaccagaggggtgaagacggtcatttccgccagtatgaccccctgaatcgaatagagaaaatccaccggcggcagttcaaaagcaaacagcgacatcagcgttccgttcagcagaccggcggagccgtaaataaaggtgaaagccagggtgatgagaaaggtcggcagcgcaataaaggtatcaattatccggctaatcagctggctaccgggaaacgggataaacaccagaatcagcgccagcacgctgccgagcagcagacagcctgatgtcgcgataaccgcgatttgcaaggtattgagcaatgcgctgagaaagcgccgggactccaccacctgccagaaggtttcgaggcccagatgaccctcggtatcgcgcagcgcctgttcgccgatgagcagcagcgggtagaaaaacagggtcgccagcaccagcagcggcggcagcagccacagtaagggccgcagatgaacagagcgacgcgggagcgttaagatctgcgacattatgacacctcaatcaggaccgcatcgttgggttcaaaatagagcgccagcctgtcgcccgcacgcggcagcggattcacgtgggtcatcacgatacgcaccgcctcccccgccacgtcgcatagcagatgggtcaaatcgccctgccagtgcacggaggtcaggatggcgttcagccggttgctggtggccgatcgcggcgcgagactcatatgctgcgggcgaatacacagcagcttattgttgccatgctggccgccgcggctgaacgcggcgatcaatccgccgccgcagctgacgctgaccaggccaggtcccgcggtatctgtcagcgccgtcgcctgcaggatattggcacgtccgagaaactcggcgctaaaacgattaggcggatagtggtaaagctgatgggtttcgccgtgggcaatgagcgagccgtctttcatgatgccaatcttgtccgccagggtcagggcttcggtctgatcgtgggtgacgtagagaatggtcagctccggcagttcacggtgcagacgggcaatttcctccaccatgttgtgacggatttgcgcatccagcgccgagagcggctcatcaagcagcaatacccgcggacgcacggcgatggcgcgggcaatcgcgactcgctgctgctggccgccggaaagctggtgcggatagcggctggcgtaatccgccatgccgacgattttcagggcttcctgaacccgttcagcgatctgcgctttgggctgcttctgcgcccgcaggccgaaggcgacgttatcttctaccttcatgtgcggaaacagggcgtagttttgaaccaccataccaaggccgcgttgatacggcggcaggtgggtaatatccgtgtcgccaagcaaaattcgaccaccggcaggctgcacaaaaccggctatcgcccgcagcaccgtggttttcccggatcccgaagggccgatcagcgccagcacctcaccgggctcaatggttaatgtcagcggcttcagcaccacgttgccgtgataagaaacgcgcagcgcgtcgagagtaattccggacgtccccgccagcgacggggttggggcaacggtcgttttcattaacatcacgcttactcgctgtccgtcactttatgccagcgggcaatatccgccgacagcgaaaccgcaacgtcgtcccagttgggttcccagcttttcacgccgttaagcgccgctttcgccgctttaaagttagcgtcttccggcgtcacgtcgctgcgcaccggcagaccccaggagagcgcgctgacgctggactgagcggatttatcgagcaggaagttaatcagctttttaccgttttcgccgttcggaccgttctgcaccaggccgatggtatagggcagcgccagcgcgctgcgttcgccttgcgcgtccgctggccagaagatttgcacattcgggttacgcgccatctgcgacaggttcatttgcagatcgccgttagcgatgtacagctcgcctttattgaccagcgcggtcaacttaccggtggaagcagacggaccaacgttattggcctggagcttaccgagataatcgaaccccgcctctttgctccccatgctgtgaaacgcctgtagcatgaccgccgtaccgtcacccgcctgccccggcgtcgagtactgcagtttgttcctgaagcggctatcgagcaaatcctgccagctggccggcgcggttttcagcagcttactgttatagataaaggtcagatagttattcaccagcggcgagtagcggtcgtgtacgcccgggatccgggcgctgtcctgcggctgaaattcggccaacagctgttctttcgcggcacgctggataaacggcggcaccgtcaccagcacatcggcctgagggttggtgcgctcttttgccaggcgttcaacaatcgccccggaaccgccttccacgtactgcaccttgatgcccgttgctttggtgaaagcggcgaactggtgctggtaccagctgttatcaccatcgtgcaggccgtcagcggagtaaaccgtgacgatgccatctgcccataccggagagctggtcagcgcgaacagggacagcagggcaagtcgggagagtttcatcgtatatgcctcatcgggtagttagtcattctggtatagaccagattgtttttcacgctaccgggggtttatgacaaaacgatgaatgaagtgtggcgaaaggatgacgccggagcagaagacccccctcccggaggcggcgcttgacgcgcctgtccgggctacccgtccgcaaacggcggtaaacccgtagcccgggtaaggcgccagccgcaacccgggaaaacgctcgggctggaccaataaaatcaatgggtatcgacttcaatacgcaggctgtcgtggcgccagtactcaatatcgtaatcgagaattcgcccgtgctgatcgtagttgaggcggcgcaagagcagcgccggacgcccttccatcacccccagggcgtcggcggcctggggcggcatcgaggtgggccagaacgacagatgcatactggtatatatcaggtcatagcgggtctgataaatctcggtcaggctgccgtttaaatcgtggcgcagcagctccggaaccctggcgggcagacagtggttttcacagtagcaaatcgcccgcccgtcggcataacgcagacgggtgagcaggtaaacctgatcgaatggctgcagcgccagcggcgccataacgtccagcggaacggtgaccagacgcccgtcgagcagtaccgttttcggctcccgcccctgttccaggcacagcttgtggaagttggtattctgcgtcggatccaaccacaagcgctccggcgtaacaaaccagccgcggcggtcggcgcgataaatcacgccgctggactcaagctgcgccaggctctcacgcaccgtaatacgcgtggtgttgaacagcgcgcacagctcgcgctcggacggcagcttatcgccgctcttcaacgcgccgttttgaatacgcgcctgaagctgcgccttgatcagcagatactgtggcgtctcgccagagggtgatttcatgttcgctcgcggccaaatttgatgcgctcattatacataaccagatgaattttttgttgcagcgctactttccctttgaccttttcggggcacgatcgccattataaaaaacatctggtatagaccaaatggtgaaaacaatgacttcgcgtaattatctgctgctgacgcccggaccgctaaccacttcccgtacggtaaaagaggcgatgctgttcgatagctgtacctgggacgacgactacaatctcggcgtcgttcaggtcattcgccaacggctggtggaactggcgacgcccgctaacggctacacctcagtgctgctgcaaggcagcggcagctacgcggttgaagcggtactcggtagcgcgatcggcgcgcaggggaaagtgctgattatcagcaacggcgcctacggcgcgcgcatgatcgagatggcgaaactgatgtgcattgcgcaccatccctacgactgcggcgaagtggcgcggccggacgcggcggcgatcgaacggatcctgcaaaccgacccggcgatcacccatatcgccatggtgcatagcgaaaccacgaccggcatgctcaacccgatcgaagaggtcgccgcgctggcgaaacggtacgacaaacgctacatcgtcgatgccatgagcagcttcggcggcattcccatggacgtcgccgccctgaatatcgattatctgatcagctccgccaacaaatgcattcagggtgtgccgggctttgccttcgtcattgcccgggaggcggaactggcaaactgccagggccgctcgcgctcgctgtcgctggatctgtacgcccagtggcgctgcatggaggataaccacggcaagtggcgcttcacctcaccgacccataccgtgctggcttttgcccaggcgctgaaggagctggcggaggaaggcggcgtgcgcgcacgtcatcagcgttacagcacgaaccagcagcgtctggtggcgggaatgcgtgcgctaggctttcagccgctgctcgacgatagcctgcactcgccgatcatcaccgcgttttactccccggatgcgccgcagtatcgctttaaggatttctatcagcggcttaaagagcagggtttcgtgatctatccgggcaaggtgtcgcaaagcgactgcttccgtatcggcaacatcggcgaagtgtacgacgccgacatcaccgccctgctggcggccatcaaaaacgccatgtactggcaatgctaaggaaccgtcatgaaccgtattaacgccgttattcttgattgggcaggcaccaccgtcgactttggctccttcgcgccgacgcagattttcgttgaggccttccgtcaggcttttgccgtggagattacgcccgaagaagccagggtgccgatgggtctcggcaaatggcagcatattgaagcgctggggaaactgcccgccgtggacgcccgctggcaagcgaagtttggccgggcgatgaacgctgccgatatcgacgcgttctatgctgcttttatgccgctgcagattgccaaagttgtcgatttttctgcgccgatcgccggggttgtcgacaccattgccgcgctgcgcgccgaaggcataaaaattggctcctgttccggctatccgcgtccggtgatggaaaagctggcgccggccgccgccgcgcagggctatgcgcctgaccactgggtggcgacggacgacctcgccgtcgggggacggccaggcccgtggatggcgttacagaacgtcattgtcctcggcatcgactcggtagcccactgcgtcaaggttgatgattccgctcccggcattaccgaaggattaaacgccgggatgtggagcgtgggtctggcggtttccggtaacgaattcggcgccagctgggaggaatatcagcagatgagcgccgaagagatcgccgcccgccgcgagcacgctgccgggaagctgtacgccgccggtgcgcactatgtggtggatacgctggcggatttgccgggcgtgattgccgacatcaaccgtcgtctggcgcagggcgaacgcccgtagttttattgacgattcgcctgactgcggccccattacactcgtactttcgtcgccaccagcaggccggtcagcagcatcaacgtaccggagaggaccagcggcgagagcagaccaaggtgatccagcgccacgccgccaaccgcggcgccgcaggtgttggccagctggatcaccgccacctgaatcgacccggctttctccgcctgatcggacagggagcgggtgatccacgttgaccagccaaccggtatcaacgcgaaggcaaagccccagataacggcaaccgtcgacgccacgattttactctccccccacagtaccagcaccgccgcgctgatggccagcaccaccggggcaaccgccagcgccgctttcaccgaacgtttgagcagcatcgaagagagcgaggtgccgacgaagctggcgatgccgaagctcaacagcaccagcgtcaggccgtcaacgtcaaagcctgccagcgtcatatacaccgggcgaatataggtaaagaaggcgaactggccggcgaaggccataaaaatggcacacatcccggccatcacgccggggcgctttagcaggccgaacatattttgctgcgccgaggtcgactcgcccggcagagacggcagcgccttcagcacccaaatcgtacagaccacccccatcaccgcggcgccgttaaagacgttacgccagccgataatcccaccgaggaagctgcccagcggcgcggcgatcaccagcgctattgataccgcgccaaaaataaccgacagggctttgggcaccacgcgcatcggcaccagccgcatggtgagcgacgccgacatcgcccaaaagccgcccagcgccagcccgaggcaggcgcggccgagcagcaataacgcaaagctgttggcaaaagagaccagcaggcaggaaagggtcagcagaaccgaaaacagaatcaccacgtagcggcgatcggtactgcggatgatcgaggtgataaacaggctggcgaacatcgccacgaacgccgtggtggtgaccgactgtccggcaaccccttcggagatgcctaaatcctgcgccatcggcgtgagcaggcttaccggcaggaactcaacggtaatcaggcaggcgacgcagaaggccaccgcaaaaaccgccgaccagttgggtcgcgccgcctgatgagcctgtggcgtagaggcattcgaaggagtcataagttacctgcatggttgaacacggggaagccgcgcagtgtaacattttaaatgtgacgaatttaacgttttgacaactttctcaccagcatcgccaacggacacaaggttcgcaggattaaagatggaatgcgattcgcttaccggttggcagcttaacatcaatactgagttcccccccgagcgctgcaacatagcgcttcagcgttgacaaacgcgggtcgttatcagcctgttccatttttgctatggtgggttgtttaacgcccattgccttagccagctctgcctgagacatattgagttcttcccttaacatacttaaagcgatagcctggcgcatctcctcgactttttcagcaatacgcgcctggctttccgggctctgtttggccattaattctttaagggtcgccatattttttccttactgattaaggtgcttacggtactcagcatctgcaagcttgatcatatctttatagaatctcttttcatttaaccctgttttatctccggcgcataacacgatgccacaacgagaagggtcaaatacaaagaaagctcggatgggtctaccttgatgctgaatgcgcagctctttcatattcgaaaaggcagaatcgtttactgtatccgcaaacggccttcccaaccgggggccatactcggataagatcaccattgcggcgagcatatcctctttgagcgcttcggtctgcgcctcaaaccacttgtcaaaaacctccgttgtttcaacatcccacatcagcgatccctcatagccaataagctataagtaaattatagcctactagctataaaagcaacccctctttataaaatgacttacgcattggctaatctgctgtcacgtgccgccgtcgccagcccagcccgctaatgaggatttcattggaaggacggccagatgatggccctttgttacgatgacttatgcaccggtggcctcatcggcgtgacgtttaacgaagccaacagtgcaccgggaagtgatatcagtgcagccagtggacgccatcctccggcaaaaacagcgcgttatagcgctcctgcaaagcgtgcaggtcgctcacttccggctccagctcgcgaagaaaaccttgtgccaggcggatttgcgcttcggtaatcggcgccgcgaggcgggactttttcatcaaccgataccagtagtgcaggttctgctcgctgccgtcgacgatagcgacctgccagatcagcagcacctgcgcagcattttgcaaatgcgcttcattcggccgctccaggtagcgcagatactcgttgccggcggtttttcccagctgatcgatcatcgattccagcggtaccggcgtaatgcctaaccgttcgctcagacggcgaatcgcacggcgtgaatcagaggtaagtacccgaaatcccacaacaaataccactatcagcgtggccagtcctaaccagatcatgcatcctctcattcaatacccgtcatacttcaagctgcagatgcgttggctacggattactcggcccatccatgggcctcgccctgacgggccgccgttacaggacgttcaaatctgctcccggcagatttgtcgttcacctcagtcacatagttatctatgctcctgaggattaatgagaggctcctgcctctcaccggaggccagccttcggctggtcaaattcgttcccgacgaatttgtcgctcccttgccgcctttctgcaacatgaattatttagggtatcccgcagccccactatcataatgggaaattgcccgctgtcgactgtcggtggtaccagaatgtgacttatcgcgaccccgtctcgctatcatcaaaccgcccggcaagaggtataaaaaagcccggcgcaggggccaggcaacgtgactcacacccaatgactcaggcagtctgcaaagtttgcgtctttttctgacggcggattttacgttcttcaaacaccgcaacgatggccatcaggcagatgcagccaatcgccgccgcatccagcgccgcaaaggtgcccgcccagccggtgagaccgaaaatcggcgtaccgtcggcaatcatcccgaggcccagcttggcgaagctgtcgccgatcagataggcgaaggtgcccttgatcccgtcggcagcgccaatcgcctttttcggcacgaaacctaccgcggcaacgccgatcagcagctgcgggccaaacaccaggaagcccagcgcaaacagcgaggcgagataaacgtactggttgctggcgtgctgataaacccccagggtggcgataatcagcgccagcgcaatgcaggccaccagcgcgcgacgaccgtttgccagatccgacagccagccccacagcagcgtgccgaccagcgcgcccacttcaaacagggtaaagccctgaatcgccacctctttggagagcttcagctcctggaaagcgtaaacggtggaccactggtcgataccgatgcgcaccacgtacaggaagatattggagaagcacagcagccagatgactttgttcttcagtacgtactcgacgaagatctgccatttggtcatggcgttctcttccgtctctttatcctcttcgctgatctcttcgccaaacagctcttcggcgttaccgaggccgtaggattccggggagtcgctgccgaagcgcaggccgataaaaccgacgatcagcgcgataatcgacgggaagataaacatcccgatcacgtggccgtcgaacaggtagttggcgccaaacagcgctacgcccgccgcgccggcgccgccgaggttgtgagagatattccagaagccgaggaaggtgccgcgtttacggcggggcgtccacttggtaatagtcgaatagctgcatgagccgccggtgctctggaaaaagccgctcagggcgtagaagacgatcatcaggaacaggctggtcgaccctgcgcccatgctggcgctgaagccaagcatacagatggccgaaaggatcagcataaacggcagaaactgcttagtgttcttaccgtctgcgtagtaagaaaccagcgttttaccgacgccgtaggtgattgagaatccgagaccgatcatccccagctgcgtcatgctcagcccgtaggtggagatcatgtcgttctgcgcgatgttaaagtttttgcggatcaggtacatggtcagatagccgatgaaaaccaccagatacgactgcatgaacggtttgaaccacattttgcgccgcgcttcgagcggcaggtccagggttggcttacgcacctggtttaagaaggccagcatgattgggtgactcctgagctgatttagtacctgcgaatggcaggcattgtaaaaatcagccgggagactcgcctgagacagcgtccaggcgaaaccgggaaaatttcttagttttacgccattcggcgaagaaaggtgaagtgggtcacgcttctcgcggcgcctgggcgtttaaaaacggcagcagcagcagggcggaaatgccggcggcaatggcgataaccacgaaaaagccgctccagtgccagatttccatcacctgcgccagcggccagccggagagcgatgcgccaagataggcaaacaggccaacaaagccggttgccgcccccgccgcctctttgtgcgagcactccgccgccgccatgccgatcagcatctgtgggccaaaaacgaaaaagccggtcgtgaagaagcaggccgcctgcatcacgtagctggcgaacggcatcagccagaggccgcccaccgacagcaaaataccggcggcgaaaatcaggttcatcggcccgcggttgccgttaaacagtttatccgagccccagcccgccaccagcgcgccgataaagccgcccacctcgaacatggtgaccgccgaattcgccgtgaccagatcgacgccgagcgtttccgacatatacaggttgccccagtcgttaatcgccgcgcgcaccacgtacaccagcacgtagcacagcgagagcagccagatatagggattcagcagcacgtatttggtgaggatctctttacgggtcaggccagcgccctcctgctgctgggcaatctccagctcatcgtgccgccagtcgcccacggcgggcaggccgaccgcctgcggccggtcgcgcagccgccagcagagaaacagtccggcgaggatcgccagcatgccggcaatcatcatccccgttcgccaaccgtagtgcagcgccgccgcgccaaccaccatcgggatcagcgccccgccgacgttatgcgccgtattccacagcgcccaccagccgccgcgttcggtgcgcgaataccaggtcgtcagcagacgggcgcacaccggcgagccccagccctggaagaaggcgttcagcgcccacagcagcgcgaaggcccacagcgaagtggaaaagccaaacagaatattcaccacgccggtagcgaccagaccgatgcccataaaatagcgggcgttagagcggtcgctgacgataccggagaaaaatttcgacagcccgtaggtgatgtagaacagcgttgccagcaggccgatatcgctgcgcgtcagcacgttgctggcgaggatttccggcacggcggcgttaaagcttttacgcgtaaaataaaacagcgcatagcccagccagatggtcagcagaatatgccgacgccagtagcggtagcgcgcgtccagcgccggtttgtcggtaatcggcggagcagcgggcggggatttcaaaaaggcaaacatcgtcgctcctcaggcgtagcgcagcggcaggctgacgcaaacgcgggtgccgtgggtgcaggagatggttaaggtgccgcccagcgcgctgacgcgctcgcgcatgccggtcaggccgaagccctgctgacctgagcccggcggcaggccgcagccgtcgtcctccagcaccagcatcagccgctgctcctgctgccagccctgcagcgtgacggcgctggcgctggcgtgtttgacgatattattcagcccttcctggcagacgcggaacagggtgacgcgctggttttcgctcagcagcgactcatcaatgcgccacgccagatggctgaccataccgcggtcctccagctccatttcgcgcatcaacgaacgcaccgcctgttcaagcgtcaggtcgtccagctggcgcgggcgcaggcggcccagcaggcggcgcaccgaatcatagacgccgagcgaaagctgctcaatcagctggccgctctgcctgacgctggcgctgttaggcgccagacgctggacgatccccgcctgagtacggatggcggtgatggtctgcccgatatcatcgtgcagctcgcgggccacctcgcggcgcacgctctcttcggtttccagcaggcgttccgccagccgctggttacgcaccagctcgttttgcagcgactgattcagctcgcgcagccgctgaatgcctgcgcccagcagcaggcccgtcaggctttgcgccagcagcgaaagcagcaaatccaccggatgatcgtgccagctctggctggcaatcagcgcgatggcgttcatcagggtcgcgatcagcgcgccctgccagccgtagtgccaggccagggcgataatcggcagcgccaggcagaaaggcgtaaatcgcgagagctcggcgggcagccccagctggagccagagactgacgctgaacagcagcaggtaccagataagatgccgcccgcgccagtttaccggctgcgagaccagcgatggccccagcggccgccagacggtactggtaaggtagtgccagataaccaggcaggtaggcgccagcgtcaggccgccggtcagggtcagcagcagcgcgttcagcccctccttgccttccggcagccacggcagcgactggagcagcgcagcggcgatcagcgcccctccctgacgcagcagggtgagccagtcacgctgctggcgatagcgtgagatcagcgccaccggcagcagggtcaacagacttccggtcatcaatattatcgggtgcgccagcgccacttcctgcgccagccagaagatcagcagccactcagcgcccagcagaaccggccagtagccgcgcggacactgcagcatcaggccaagacgcaggccaaaggggaaaagcagcaccgcaagatcggcacgctccaccaggtgcaggctgatgctccacaggcaaaaccatgcggcggaaaagataaagcaacagccaataaccgagagcagccgggagagaaaggcgttcattgccagctatcgaacatgcggcgcgccagctcgacgtcgttgctgacgcccagcttttccagcagattggcgcgatgaacgtgcacggtttttggcgacaggcccagctcggcggcaatctcttttaccgccatcccctgcgccagcttttccgccacctcgcgttcgcgtttggtgagcgggtcccgtcgcccggccgccagcttcatggcgatatccggcgtcaggtagcagccgccagccgccacggtgcggacggcggcgatcagctcatccgggctgcagcgcttggagagaaagccgcgcgcgccggcgttcagcgcctgctccaccagcgccgggctgtcgtgcaccgacagcatcacgatcgccatccctttaggcaactggcttaacagctcaagcccggagatatccggcatcgagatatcgcagatacagacctgcacgccgcggccgggcagccccgccagcgcttcgcgaccggaaccgaattcggcgacgacctgaaaatcggcttccagccccagcagctgggcaaagccggagcggacgataagatgatcgtcaataagggcgattgtggtcatggcgattcctggggaggataaaaaacgcgcttaccttaacggtataaacgtcatccttcaagctgcctctgttccccccagtcactgacttcagtcagctccagggggattctcagagttgccgccctgatgcggcttgagtgattttgtttatcgcgcgcagcggatcaagccgcgagcgattattcgaagaacaccgcgattttgctgaacatggagggatcggactgattgcgcaccaccttctcaacgtcttccagcttttcgatctggctaatcatctgcccgaggcgctgatcgtcgttgaccagtagccagatgcggctctggttgctgtccgggatcggcagacaaagaatgccttccacgttaaatgcgcggcgggcaaacaggccgcaaacgtgggtcatcacgccagggtggttgcgcacggtgagctgtagaataacgttttcatgagtcgcttgttgcatggcttattcccccaccatttcagtattggccgcacccggcggtaccatcggatacactttttcttcggcatcgatacgcacgtggatcagcgccggacccgggcggtcgataatcgcctgcagcgccgcctgcggatcggcttcgttatttaaatcacaggtttgcagaccaaaaccggcggcgatctgcataaagttgaccatgccaggataggtcgcggcgaacacgccctgcttgtagaacaggctctgctgctggtgaaccagccccagcgcttcgttattcatcaggataattttcacgtccagctgattttccgccgcggtagccatttcctgaatgttcatcatcaggctgccgtcgccggagaaacagatgaccttgcgctgcgggttagccagcgccgcgcctactgcggcaggcagaccaaagcccatggtgccgaggccgccggaggtcagccactggcgcgggcggttgagcggatacgcctgcgcgacccacatctggtgctggccgacgtcggtggtcacgattgcctcatcgtcaacgcaggcggcaacggcgttaatcaggccatagtgggtaagcgggtcttgctcctgcggaatggtgcaggggaactcccgctgcagatcggccaccagctgcagccattcgctgcgcggctgcgcctcgacctgcgggatcagctgcgccagcacttcgccaacatcgccctgaatcgccacgtgcggctgtttgattttgcccagctcagagcggtcgatatcaacgtggataattttcgcgttcgggcagaactgctcggttttaccaatcgcccggtcatcaaaacgcgcgcctaaaacaactaataaatcagcctcttgcaaaataaaattggtgctgcgcgcgccgtgcatccccagcatgcccagcgacagcggatgcgctttcggcagcatccccagcgccatcagggtctgggtggttggcaggttggctttttccgccagctggcgaatgggctcaggcgcgttgatcaccccaccgcccagatagagcaccggacgctgcgcggcgttaatcatcgccgccgcttcacgcacgctggcgctatcgaacgtcggaggcgccgtacgggcgccgggttccggcagggcgtcaagctcaatggtcgcggcctgaacatccttaggaatatctatccacaccggccctggtcgcccggactgcgcgatgcgaaacgcgtcgcttatcacctgcggcagctcagcaatgttgcgtaccagatagttatgtttcgtgatggggatagagataccgtaggtgtcgacttcctggaaagcgtcggtgccgatcattgaggccggaacctggccggtaatgcacaccagcggaatcgaatccagacgggcgtcagcgatagcggtgatcaggttagtggctcccgggccgctacaggccatacacaccgccggtttgccctcggtgcgcgccatgccctgggcgataaaccccgcgccctgctcgtgacgcgccagaatatggcggatctgcgtgctttggcttaacgcatcgtaaatgggaaggatggagccgcccggaatgccgctgaccgtagtgatcccctgacgctccagtaaatgaacgactaactgtgcgccagtgaagcgcattttttgtgatgttgtgcccgaacttgccatgctccagtccttttattctgggccgacttaccggggggcatgaaacgaaaaaccccgctcggtttgcgccggcggggtttggaattcgtgttgttccggaccctacggcgcgttgccgacgacgaccaccacagacacgacgaccaccgcggcaggcgcggttagtagtagggtcgaagtcagcgtggtagcgttcatgagggacctgttgtctcaaaaaagggaatgaatttatacaaacacagcttttgtcatttcacaatggatttattttcaaccaggagaaactgcgcggaagatcacattaatttgcggcgggataaaaacaaaaaaccccgccgcggcgaggttttctgttcggtgtttttacggttggtagccgcaagcacactgtattacgtcaacgaaaaaagtatacgcgatcggggaagaaggcgcaattttcacgatggtttttgctgatttagagtatggatcgcgtatacaaatttgtccaaaaaatactgttcatatatacagtattcattctatactgagggggtacgcagggggaatctggggccgcacttttaccggcgcaaaaaagtcctggctgaaacgggtggtgccgtcagcgccttaaccccagaagagcacactgtgttacgtcaacaaataccccgaattattgagtccgccaccggcaggtggcgcctgaatatgacgggtataccctggctggcaacaggcggcggaaaggtacgccagccggttgtgctcctgaaccagaggagacgcgtatgggcggagtggatatcgttgttctgatcctgaaactcatggttgccgtgttgcaactacttgatgcagtcctgaagcagttccgctgattcaggttcaagtcgcacctgagaggggcgggaaaccgcccctctacaggctaacctgacggagaaaaattatggcaccgttgttgatcgccgctatcaccccggacgaacctggtttttcggcactccgcgccgaaagcctggcgcaaaacctgaacatgctgcgtcgcctggcggagaactggcagaacggggaaaaccgttttaacgcgccgggagaaaagctgctgggggcttttgcgcacgggcagctggtcggcgtgtgcgggcttaacatcgacccttttagccagcagccgcgggccggtcgcatccgccatttgtatatcgccgagcgccatcgtcggcaggggatcgggcatcagctgctggtctcggttatcacccactccggcagcagctttgattttctcaacacccatgcgccgtcaacggcctggtcgttttatgaaaatctgggatttcgcccgatatatgatgaaccccgggtcacccatcgtctgttctgttcgctctagccgccgctggctgctgaagagtgcgcatgttacagtccgttgacgatttattccccagcgccaggccgcaatgaccattaccgtattctgtattttgctgttcgccgccctgcttcacgccagctggaacgctatagttaaagccagcggcgataaaatgtacgcagcggtaggcgttagcggctctgcctcgctcatcgccctggttctgctcccttttgccccccaacccacgctcgccagcgtgccgtttcttgccgtctcctgcgcgctacaggtggtgtatacggtgctggtggcaaaaacctatcaggtctcggatatgagccagacctatccgctgatgcgcgggaccgccccgctactggtggcgataatcagcgtcgcctttcttggcgacactctctccccgctggcgtggctgggcatcggcgtcatctgcctggcgattctggcgatggcctttaacgggcgcgccagttcgagccagggtatcgtactggcgctgatcaacgcctgcttcattgcgggctacacgctggtcgacggaaccggtgtgcggctttcagaaaccgcgctgggctataccctgtggaccttttttatgaacggcttctgtctgctgggctgggcgatgattgcccgacgcccgcaggccagccgctatctgcgccagcactggaagaaaggcatggtcggcggcgtcggtaccatgggctcctatggcctggcgctgtgggccatgacccaggcgccgctggcggtggtagccgccctgcgcgaaacctcgattctttttggcgcggttatcgcgtttatcctgttgaaagagaaggtagttccattgcgcatcgccgccgcctgcggcattgccgccggggcgattctgctgcggctgtcgtaatccacacatggcaacattagttgccgactttcgtttacaaaacctgcctgaacatccccgacaatccccccttacagggttgttctgtcatttttatgtggtagattcctccatcgtttagcgggtgtgccagtcacatattcttcatctccaactttatacaaagtattcatcgacatgaaacggcataagaacttcaatttgttgttgatgctggtgctgctggtggccgtaggccagatggcgcagaccatttatattccggcgattgccgatatggcgatatcgctcaacgttcgcgaaggcgcggtgcagagcgtaatggccgcttatctgctgacctacggcgtctcgcagcttttctacggcccgctctccgatcgcgttggccgccgcccggtgatcctggtgggaatgtccatttttatgctggcgacgctggttgccattaccacccatagcctgccggtgctgattgccgccagcgcaatgcaggggatgggtaccggcgtcggcggcgtgatggcgcgaaccttgccgcgcgatctgtatgaaggggcgcagctcaggcacgccaatagcctgctgaatatggggattctggttagcccgctgctggcgccgctgattggcggcattctcgataccttatggaactggcgggcctgcttcgtatttctgctggtactttgcgccggcgtcaccttcagcatggcgcgctggatgccggaaacccggcccaccggcgcgccgcgtacccggctcatcaccaactataaaacgctgttcggtaccggcgcgttcaactgctatctgctgatgctgatcggcggcctggcgggcattgccgtattcgaagcctgttccggcgtgctgatgggcgcggtactgggtctgagcagtatgtcggtcagcattctgtttattctgccgatcccggcggcgttctttggcgcctggtttgccggccggccgaacaaacgcttcccgacgctgatgtggcagtcggtgatttgctgcctgctggcgggggtgctgatgtggatccctggcctgctgggcgtgatgaccgtctggaccctgctggttcccgccgcgctgttcttttttggcgcggggatgctgtttccgctggcgaccagcggcgcgatggagcccttcccgttcctcgccggcaccgccggggcgctggtgggcgggctgcagaatatcggttccggcgtgctggcgtggctgtcggcgatgatgccgcaaaccggtcagggcagcctcggcctgctgatgatgctgatgggattgctgattctgctgtgctggctgccgctggcgtcgcgctttcatcaacaccagcagccggtttaaggcttctttgcgggttccccgggtcgcgacgcggcgcgtcttacccgggctacaaatgacggacgccgataaacccgtagcccggctaagcgcagcgcaagccgggaagcagtggcgaattatcagccccggcatatttcccggaggcggcgcctgacgcgcctgtccgggctaccggcccgcagacggaggtaaacccgtagcccggtcagcgcagcgccaacgggatgaaactaagccggtcatcataattgcgcctgactctgcagccagtggataaaggcgtcaattttcggccactgacggcccggcagggtcgtcacgtagtagtgctgatggcacttcagggtcatctcgccgaacggtgcgatcagctcgccgctctccaggcgcttttgcaccagccgcttacgccccatcgccacgccaacgtgattcatcgcggcaatcaccgctaaatccgaacgatcgaagccaatacccgacgattgcggcaaatcgacggaaaatgtctgcgcccagctgaaccactcatcggtgccggaatcgttgctccacgcctgacgatcgtgcagcagcgtacagtggcgaagattgccggggttctgctgtagctgatgctggcgcgcgtaatccgccgtgcagaccggtacgatggcctcatccatcagaaaatggtggctcagctgcgaggaaggcgcatcatcgaagtagattgccagatcgatgcccgcgcgctgcatattgacgttatcgttgccggtcagcacggtaagcgagatcgacggatagcggcgggtaaaatcgccgagcgcgggaaccagccagcactgggcgatggacgggcgcgaatagaccgttaacgtccccgacagctcctggtttttaatatccagaatttcctggttcaggctatccagcgaggacttcagcgcccagaacacccgcttaccttcatgcgtcagctctactttgcggtgcgagcgcacaaacagctggatccccagctcttcttccagctgattgatacggtggctcaccgcgctgggcgtcagcgacagctcctccgccgccagcgcaaacgactcatgccgggcggcgacttcaaaggtatacagcttcgatagctgccagccgttaagcaggcgagtgcctaactcttttagcgtctccatctcttactccttcacaattccccgccgagtgtaagaaatttttcgcgccagctgcgcattaaagatgaataaaagtgatgcatagcacacataacagacaattttagagcaaaatcacctttttgattcaatctgattcacctgaagggccgtttatatcgtttgtcagcgcgtgccgtttttctgttcaatacccatagattattcacaggcgaggtggggtatggaatctcagatctgggttgtgagcacgctgctgatcagcatcgtgttgattgtattaactatcgtcaaactgaagtttcacccgtttctggcgctactgctggcaagctttttcgtcggtgccatgatgggcatgagcccgctggatatggttaacgccattgagagcgggattggcggcacgctgggcttccttgcggcggtgattgggctgggaacgattctcggcaaaatgatggaggtctccggcgcagcggaacgtatcggcctgacgctccagcgctgccgctggctgtccgctgacgttattatggtgctggtgggcctgatttgcgggatcaccctgttcgttgaagtgggcgtggtgctgctgattccgctggcgttttccattgccaaaaagaccaacacgtcgctgctgaagctggccatcccgctgtgtacggcgctgatggcggtgcactgcgtggtgccgccgcatccggctgcgctgttcgtcgccaacaagctgggcgcggatatcggaacggtgatcgtttacggtctgctggtgggcctgctggcctcgctggtcggcggcccgctgttcctgcggctcctcggcaaccgcctgccgtttaaagcggtgccggctgagtttgccaacctcgaagtgcgcaaagaagagaccctgccgtcgctgggcgccacgctgtttacggtgctgctgccgatcggcctgatgctggtaaaaaccatcgccgaactgaatatgaccaaaggcggcacgctgtatatgctgctggagtttatcggcaatccgatcaccgccatgtttatcgccgtctttgtggcctactacgtgctgggtatccgccagaatatgggcatgagcactctgctgacgcatacggaaaactgtttcggttctatcgccaatatcctgctgattatcggcgcaggcggggcctttaacgccattctgaaaaccagcggcctggccgatacgctggcggtgattctgtcgaacctcgatatgcacccgattctgctggcctggctggtggcgctgattctgcatgccgccgtcggttccgccaccgtcgccatgatgggcgcaaccgccatcgtcgcgccgatgctgccgctctatcccggcgtgagcccggaaatcatcgctatcgccatcggctccggcgcgattggctgcactatcgtgacggattccctgttctggctggttaagcagtactgcggggcaagccttaacgaaacgttcaaatactataccacggcgacctttatcgcttcgctgcttgcactggccggtacattcctgctttctttcatcatctgagcgcaaagagacgtaatatgaaaaacgctgacatgaccactttactcgcccagtttcctctactggaggagctgatagccctgaaagaaaccacctggtttaacccgtcaacgacgtcgctggcggaggggttaccctacgttggcctgacgactgaagacgttcaggacgcccacgcccgcctcgatcgttttgcgccctatctggcggaagcctttccggaaaccgccgccaccggcggtattatcgaatccgagctggtggccatcccggcaatgaaggcccggctggaaaaaacctttcgtcagcccattgctggcgatctgctgctgaagaaagacagccacctgccgatttccggctcgattaaggcccgcggcggcatttatgaagtcctgacccacgcggaaaaactggcgatcgacgcgggattgttaaacacagccgacgactaccgcaagctgctgacccccgagttcaggacgttcttcagccagtacagcatcgccgttggctccaccggcaacctggggatgtcgattggcataatgagcgcgcgcatcggcttcaaggtgacggtccatatgtccgccgacgccagagcgtggaaaaaggccaaactgcgcagccacggcgtgacggtggtggagtacgaagaggattacggcgtggcggttgagcaggggcgtaaagccgccgagtccgacccgaactgcttctttatcgatgatgagaactcgcgcaccctgttcctcggctactccgtggccggcgagcggctaaaagcgcagtttgcccgcgaagggcgcgtggtggatgccagtcatccgctgtttgtttatctgccgtgcggcgttggcggcggccccggcggcgtggcgtttggcctgaagctggcgtttggcgataacgtccactgcttcttcgccgaaccgacccactccccttgcatgctgctgggggtgtataccggcctgcatgaccagatttcggttcaggatctgggaattgataatctgaccgccgcggacggtctggcggtaggccgcgcttccggtttcgttggcagggcaatggagcgcctgctggatgggttctactctctcgatgaccagacaatgtacgacatgctgggttggttagccgaggaagaaggtattcgcctggagccgtccgcgctggccggcatggccgggccgcagcgggtctgcgccagccaggcgtatcagcagatgcacggtttcaccgccgggcagatgcgcaatgcgacccaccttgtgtgggcaaccggcggcggcatggtgccggaagaggagatggcgcagtatctggcaaaaggacggtaaacctcccgtcaggtcaacgcgatggcgacgaagcttctttcgtcgccattttttagcgcagcagatgcataagctcaaccggcgaacgatgctgattgagtagatcgcgcagaacgcgcatatagggggcgctccagctataaaactgccggtaaccctcgcatagcgcattggagccatcctccagacgcagctgcgggcagcccccaccgcataatcttagccaggcgcagcccgcgcaggctggccccggcggattgttggcatactgcaccgactcgccgcgccaggcgcgcagcgtggcctcaaacagcggcacgacgatgcggttagcatcttctttaacccaaatcgcaaacaccgcgcagaggaaatccccccacagccgggcgtcggaaggttgcagatggggaataaacttgatggccacggctccctgagcgctcagctgatggtagacacgctcggggcgttggcacgcctgacgatcgataatgacttcctgtaccggaagatcgctcgccagcgatttgcagttcccgcagtgccgatcgtcaccgtaatcggcctgacatcctgtcatgtcatatccttaataaacaaaatcacctgtcgtatatgggttacagcaaacaacaatgacagggaaagtactgcgaatgcgatcaaaaatttgtcacgaaccgcctgcggctgagcaaaatcgctttgctcaacgttcatcagattgcggctgcgggtatagcgccagaggataagggcggcgaacggcaatatgcacagcgaaatccagaatgcgatccccgcctgatgccagtggtgcttaatcgccagcgccagcagcgcgccatagcctaaaagggtgcgaaaccaggccagcgacgtacgctccggctgcaggcccggatcgctctcgcgacgcgcccggcgattatccggcatagagcaccagcgccatcaccaccacgatgacgagggtcagcagaatactgatcagcagcagcgtgcgtgtatagggaagatcctgtttaagccgcatcgccttttcgttgctcagccagcgtatatagccgtaaatcgccagaccgccggcaaacaggcacagcagcagcgccagaatttcgcgaatcagcggcgtagcgaaatccggcgccagctggtccaggccgacgccaccggctaaaaagcctagcgaagtgcggatccacgccagaaaggtacgttcattcgccagcgagaagcggtaatccggcgcttcaccaaggcgggatattttcatcatgactccttgatggattcccggttgcgtaaaataccgccgattctacctgactgccaaagcggagggcattaataatcgccccgtttcagaggaagctcaggcctgataaccgtataaagtcgggctatcaggccgataaatgaataaccggcaccctgtggctgccggtcagcaggattaatgcagttccggccagtacgctttattggccgcaatcaggtcatcaagaatcgctttcgcaacggatgcgctcggcacggttttcgacagcgcaatggcctgccacagcttgtgataagagcgctgttcccaggcatccaccaccagtttttccaccgcaacctgctggctcatcatccctttctggaagtggggaatgtcgcctaccgtcagcggctccggtccgttgtggccaaccaggcacggaatttccaccatcgcatcggcgtcaaagttatgaatcgccccgttgtttggcacaatcagcagcatgcgttcctgagtattaaaggcaatcgccgccgccagatcgacgatgtaggacgcgtgttcgtcaatttccagatcgcctgcggaggagtggcccgcagcaataatggcccgacaggcgctaaagacgtttttctcacggtgatccatcacctcgttggcgcgggtgcgttccggattggagtgcgccacgacgtagtccgggaacagataatacttaaggtaagtatttggcatcgtatccggatccagcgcctgcacgtccttcgccttggcgaaggtgtcgttccagctcgcctcggtatggggatcgtttgatggcggaacatagccgaatttcgccacatgttcgcgcagtttcggcatcagatcgttaccctgcagatcttcaatcgaggtccaccagccgaagtggttcaacccatagtagcgcacgcgcatctgcttgcggtccttgaggccgacgatttgcgccatccgcccttcgataccgatcggcatatcgcaaatgttgagaattctggcgttcggacgcaggcgacgggtcgcttccgccacaatggccgccgggttggagtagttcagcatccaggcgttcggcgaatatttttccatatagtccaccagctccaggacgccgccgatggagcgcataccgtaggcgataccgccagggccgcaggtttcctgccccagcacgccgtggcgcagcggaattttttcatctttttcacgcatcgggtatttgcccacgcggatatgcgccatcacgaaatcaacgtcggtaaaagccgcctgcgggtcggtggtatagctgaattcaatctccggcgcctgctctttgaggatcactttgcacgcctcggcgatggtctcctgacgcgcgccgtcgttgtcgtaaaatttcagcgaccgcagcgggaagcgatcctggttcgctaacagcatcagcacgatgcccggggtgaaggtactgccgccgcctgcgataacaactgagaattttttcatgatactgcctccgtcatggtggtttgttcggtctgtagagaatctttgatgagggtttccagctggtcgcggacctgaggaacgtgcaggccgacgatgacctgaattccgttgccgcggcggactacgccgtgggcgcccagcgctttaaagacgtcgtcgctttgcgtcttcgccatatcgaccagcgcgatgcgcagtcgggtggcgcagttattaatgctttcgatattgcccgccccgcccagcgcctgcaggaagccggcggcctggcccagtttggtatccgcggcccccgcggcgctggttttgccgcgcgcggcctggtaatccgctttgctatagagcttaatttcactctcttcgcggcccggcgttttcaggttcaggcgcagaatcaacgtgcggaagatgacgaagtagagcgcggtgaagcacacgccaacgcctatctggataaacatcattgaggcatggttgtggaacatggggatccagttttgcggcaggaactggtcgagcaggccgccgccaaagttgcctaccacgccgcagatatacatcaccgtcgccatagtggccgccagcaccgcatggactgcaaacagcagcggcgagataaacaggaaggtgaactctaacggctcggttattcccaccagtacggcggtcagggtggcgggaatcagcagaccggcgactttcacgcgattttccggcgcggcggtgtagtagagcgccagcgcgatacccacggaaccaaagaccttcgagttaccgtgcagcgcgaatccgccttccgggaagagggttttcagcgcctcggtactctggctgaactcatgtaaatgctgcgcccagtaaacctgaataccgctttccactaccgccgggccgaaaataaacggtccgtagacaaagtgatgtaaaccggtcgggatcagaatgcgctcaaggaaaatatagacccagacccccagcgccccggccgagcgtaagaaggcctgcagcgattcaatgcccatctgcacttttggccagccaagcagggtcagccaggcgcaggggatcatcgccaggaaggcgacaatcaccacaaacgaggagccctggaaaatccccagaaacaccggcagcggtttatcgaagtagcggttatgcagggcggtcaccagcccggagataacaatcgcgccgataatgctggtatcgagcgttttaatcccggccatcatcgtcaggccgctgcctggcgtcggctccacggaaaaatcgacgccgaagaagtggccccaggtcattcccatggcgttgatgaagtagttccaggtgaggaagctgaccagtaccgccaggcaggcccggccctgggcctgtttcgccaggccgatcggcagaccgacggcgaaaatcagcggcatattacgaaagacggtccagccgccctcttcaacaatgtgaacgatctgagcaaataaactatcgggtgctgtgagcgcttccccgacgaacatcgggttgcgcagcataatggcgatacccaccacgatcccagcgaaaggaaagagtaaaaccggggtaaacatggcgccgccaaagcgttgtatttgactgagcatttgaaaatcctcatataacaacttatagggtgagtggccttatccatacccggcatgcttcacgtaccacggtgaatgattcagggtaattatttgtactggcctgaaacgagaatagaaatttgcccggtcgacaacatgcggcgccgttacgattcgtgatcgctttcatggttttaattgcgccaatgttgtctactttttaagtaaaaattagacattctgaattgcgcttattacgcctctgtaaccaagcgtatttatccatatgtattaactctatttttaaagctaataatccgtgcatcatcgttttcaactgagtgaatagaggtctactggtgatctacaaatccatcgccgacagattacgtttgcgcctcaactcctccgatttcgaagtcggcagcccgcttcccggggaaaaaaagctggcggaagagttcggcgtcgcgcgcatgactatccgcaaagccatcgatctgctggtcacctggggactggtggtgcgtcggcacggctccggcacctacgtcgcccgcaaagacctgcatcatgaaaccagcaatctgaccgggctggccgaggtgctgcgcaagcagggtaaagaggtggtcagccgggtattggtttttgaggtgatgcccgcccccccggctatcgccagcctgctgcggatacaaattgatgaacggatctacttctcgcgccgggtgcgctatgtcgatggcaagccgctaatgctggaggacagctatatgccggtgaagctgtttcgcaatctgtcgctggtgcatctggaagggtcgaagttcgattacatcgagaaggagtgtggcataaccattagcggcaactatgaaacgctgtcgccggtgctggcggacaggcagctggcgcagtcgatgaacgtgccggagcagacgccgctgctgcgtataacctccctgtcctacagcgacagcggcgagtttcttaactattcggtgatgttccgtaacgccagcgagtatcaggtggactaccacctgcggcgcgtccaggcggagaatccgttaacctatcccccagaacagcaccgccagtagctgcggcgtaataatacgtaagaacatgaccagcggataaacggtcgcgtaagagagcgccgccgcgccgctggtggcatgcaggttgttggcaaaggccagcgcgggcgggtcggtcattgaaccggccagcatcccgcacagggtcaggtagttcatcttcgccagcatccgcgccagaataccgacagccagcagtgggatagcggtgataaagatgccgtagacaatccagctcatgccatcaccgtcaatcagcgtcgccacaaaatcgccgccggatttcaggccaaccaccgcgaggaacagcacaatgcccagctcgcgcagcgcaaggttagcgctgggcggcataaaccagtagagcttaccgatgctgccgatacgcccgaggatcagcgccataatcagcggccccccagccaggcccagcttcagcgccgccgggaaccccggaataaacagcggaatggagcccagcagcacgcccaggccaataccgataaataccggcagcatctgcacctgctgcagtttttgctgggcgttgcccagctcggcggccaccgcgtcaatcgcctccggacggccgacgaggttaagaatatcgccgaactgcaggctggcatggctgctggcgaccagctcaaccccggcgcgattgagtcgcgagatcaccacgtcatagcgctgtttaaagtgcagatcgcgtatgcgtttacccaatactttttcgttagtgaccaccacgcgctcgactttcagatcggtaccgcgcgtggagagcgaagtggaaacctccttgccaatcaccagctgggcattgtgtaaatcctccggtcgcccgaccaggtgcagcaggtccccgagctgaatcagggtattcggcgcgggcaccattagcatctcctcgcgcttgaggcgcgagcagatcagcttgtcgctgttaagcatcggcacatcctgaatcgccatattgttcaggttggggttttcgacccgcacgttgatggtctgaagatgcgcgtggccgttgccgctgatctcgtcaaactgctgggcttctttctcgacgttgatgcggaaaaacagtcgcaccagccacatggtcagcaaaatgccgcagataccaaacggataggccatggcgtagctcatccccatctgatcgacggtatcaagcggcacgccaaggtcgcgcaggatctgctgcccggcccccagcgcaggcgtgttggttaccgcgccggagaagatgccgagcaccacgggaagagggatatcgaacagtttatgcaggaccgcggtgaccaggccgccgagaatgacgatcagaatagcgaagaggttcagccgcaggccggagacgcgcagcgaggcgaagaagcccggccccacctggataccgatggtatacacgaagagaatcaggccaaattcctgaataaagtgcagcatagggctgctgagcgtaatgcccgcctggtccacaaagtggccgacgataataccgccaaacagcacgcctccgataccgaagccgacaccgcgcacttttacattgccgatccacaatccgacgaccgccaccagcgccaatacgctaacggtcaatgctatatcactcatcgtctcttccctgtgtataacattactcacaatgaggattatgaccggtactcaccaggctgtatgccgcctggcgcacaataatcacgggatcagccaacgaccattttgttgaacacagcaagaaaggacaaagtaatgcgtatcacacacaaaaaagccccgaacatcggggctttataggtggttagcttaattagctatctaacgcggggcgctcgctgatggcgatacgctgcggggcgatctgttccggctcgttgcgggtcaaatcgatatgcagcaggccgttggtaaaggttgccccggagacttccatattttcggcgagcgtgaagctcaggctaaacgcctggttaaccagcccctggtgcagccatttggtctctttttccggctgctgcggcgcgccttttaccgtcaggcgcgtgccttcaagctggatatccaaatcttcctgacggaaaccggccagcgcaagggtaatgcgatagtggttgtcgtcgcttttttcgatgttatagggcgggaagctctggctttcaccggcggtttgtagcgcgttggccagtttgtcaaaaccgatccattgacgcagcagcggggataaatcgtagttacgcatagtctttctccttctaagaagcgagtggatatctgcaaatcctgtggattcgcctttgccccctgacggcgggcagtttttttgaatgaataccgggccgccttcgcggcccaacaaattagttgatctcgatacggcgcggcttattcgcttcaggaataactcgctcaagttcgatatacagcagaccgtttaccaggttggcgccgcgaatatgaatattttccgcaagctggaatttacgctcaaaattgcgttcagcgatgccctgatacaggtaagtgcgctctttctgctcggcggcatgggcgccttttacgataagcagattatcctgcgcggtaatttccagttcgctctcggcaaaaccggcaacggcaatcgcgatgcggtagttgttctcgtctactaactcaacgttgtacggaggatagccgccattactctggctttgattattttctaacagattgaaaaggcggtcgaaaccaatagcagaacgatacagcggggagagatcgaaattacgcataatacatagctcctgaaatcagcgagaattatctgaccttccatcatggacaggccgttattacccggaatacccattcggcgtattctccgggagacacattcctaaaatgggtatatccatgaccttttcaaggggaaatgggcaattttttttgcagtttgcggtctattgcttagactggagggacagcacaaaaggcaaagtgcgacgcctgccacagtgcggcgcaatggcactatgcatccatggaatggcccgatataaccgatatgtacgccattcttcaggccgcggctctgttggctgcgccctgcatgattttgtacatagaaggttctatcaacgcccgtaacgatgacggaaaaatgatgaaaaacggtctgttaaagctggtcctgtttagcgggatgataagtttaggcggttgctccagcgtgatgtcacataccggcggtaaggaaggaacctatccgggaacgcgcgccagcgcgcaaatgctgggagatagcgatgccaactggggtacgaaatccctggtggcgctggatatgccgctcacggccgttatggacacgctgctgctaccgtgggatatgttccgcaccgatagctcggttaaatcgcgcgtggaaaagagcgagaaagagacgctggcgaccaacgcagtgatcccgccagcgccaatgccgaacccctgatttagcgggccgttgcagttacccacagctggcggtaaccgtccacctcctccatccaggcaagctgtttgccgtctggcgaaaagacgaccgcgtcggccgaaggcggattgacatgctcatcagtcaaaaagtcgatttccccgctccgcgcatcacaaagcgcgatgcggttttccagcacaaagcccagccattttcctgacggatgccagttaaacgccgactggatatcggatcggctgttggtcagctgccgcagcttgtctccctgcgccgagataagccacatttgcaccacgccggcctcgtcgcgcatcagaaaagcgatgtccgttgccgacggattagcgcgcacccaatgacgcggcgtattcaccagtcccgggtaacggcgttggtgggtaaacgttaagcgacgctgaacaacgccggcagggggcgccggcatcgtggtttccgttcctgccaatggcgcatcgccagactgcttccagccctgctcgctctccggcagctcgacaataaatagctccggtactttgtcgccatttaccgccagcgtatcgccaataaacgccagcgcccggttgcccacccagccctcttcataggcgcgattaatctcgtcgctgcccggcgcgggggttggcgttgtgcggctgaccagcacgcaccagtggctgccgccgtattctcgtggatgatccccacgcggtactaccgggccatagggaaccgccacgccaacgttgcgcaaatccagcgccggatcgcgttcatgcagcacgtggtcgttataggtaaagctgacaaattcgccgctcgggctgaagacatgcacatggctgccgccgcgcagcgcgccgggtgtatagggggcggaaatatccatcgcatcgaggttatgcgtatctccctgccaggagaccacgccgcgacgatggtggaaatcgtaatgccagcgctcgtcagggttttccgggccgtggataaagacatatttatctatcgatggatgaacggtcaccacgccaacgtacgcgccctgtccggcacggtagaggatctcaacctctcccgtctcgacattcacccgctcgatggtttcgccggtaaaagaggcgccagagggacgaacgtcgaaaaccagccaccggctgtccgccgtccaggcgcgcgtgttggtaagctgatgatgacggggagcaaaggtgacttgtttcataaacataccctgatgcgagactttcgcatcagggtatcgtatcggaaagaattagcctactcgtttgacatcccccaccagcaggatgtaagagagcgcgcccaccagcgcaataacggaaatataaaccagcgcaggggcaaaaccataatcctgggccagatagcccaccaccagcggaacggtgataccgcccagcccgccgacgaaattaaacatcccaccggtcaacccgataagccgcatcggcgcaagcgaagagaccagcgaccaggtaatggaagcgaagccgttaccgaagaaggccagcgccatcaggaccataatccacaccggatcgttggtatagtttgcgcccatgatgcaggtcgagatcagcaggccgcagataatcggggttttacgcgcggcgcctaatgagaaaccttttctcaccagcctgtccgccagccagccggagagcagcacgccaacaaaggcggcaagaaacggaaccgtggtcataaagcccgctttcagcgccgtaatccccttttcctgggtcagatagttagggaaccaggtcaggaagaaccacagcgtcgaggtcacggcaaactgtccaaggtaaacgccaatcagtttgcgatggaataccagcttccagtcggctttggtcagcggctgccgcgcctcttttttaacgggcgcatcgccgtccaccagaccaccgccgtcgcgaatataatccagctcggctttgctgatgcttttcgtcagacgcggcggctgataaaccttaatccaaatcagtgaccatacgatcccgatagcgccggtaacgataaatacccagtgccagctcagcatttcctgaatccacattaatagcggggtcaggaatgccagcccgacaaactggcctgaggtgtaaaaaccgacggctgatgcgcgctcgtgctccggaaaccagctggtcaccatgcgattattggtgggaaacgccggcgcttcaaatatcccggtaatcgcgcgcaggccaatcaacgacatcagccccgtggcaaatccctgcagtagcgtcgccaccgaccagccaaaaatagcgataaagtaggtcagcctcgagcccacgcggtcaaggaaccaaccgccgggaatctggcaaagcgtatacagccacgcgaaggcggaaaatacatatcccatttccgctttggtaataccaaactcttcctgaatatgcgccgatgccaccgcaaggttggcgcgatcaacataacaaatcaccacggtaataaagatcataatcagcgtcaaataacgacgacgcccgggttttgcagctgtaactgaaatatccatcgcaatctgtctccagattttgggcatagcgaggccgctcaccatgcccggtaatttacagagggtttatttaaattttttattaataacttaaccgtaatgcgctaaataatttgtgctggggaaaggcggcaaattttcgcattcccgggagcatacattagtatgtgactgggataagaaaatgcagccaacgcatcagcagcgcaaagtatgacgcgcatttaccattcggcgacgctaccatcctcatgccgccacaacggattacgccagtccggcgcattctgacttaattcaatgacccgcgcttcatcgatttctacgccaagcccgggcttcattaatggtttaaagaaaccgccttccatattgaagtcgtctttatttttcacaaagtcgagtaattccgcgcccttgttatagtgaatgcccatactttgctcctggaagacggcgttataggagacaaaatcgacgtgcaggcaggcggcaagcgcaacaggccccagcgggcagtgcggcgccagcgccacgtcgtaggcttcggccattccggcgattttatagcactcggtaataccgcccgcgtgcgacagatcgggttggagaatggccagcccaccggcttccagcacgcgtttaaactcgaagcgcgagaacatgcgttcgcccgccgcgataggaatcgaggtttgcgccgccagtcgcggataatattccgcctgctcggcaagaaccggctcttcaataaacagcgggcgatattgctccagctctttaatcagcaccttcgccattggcgcgctaacgcggccgtgaaaatcgagaccgaactcaatttcattgccgaacgcttcgcgaatttgcgcgacggtattcaccgccgcatccaccgcgcgagaattatcgatcagccccagctcttcgcagccgtttaatttgaaggtatcaaaaccaataccgcgcagcttcttgatgccatcaatcacctctgccggacggtcgccgccaacccagctgtaggctttgattttgtcacgcaccaggccgcccattagctgccagaccggcgcgttcagcactttgcctttaatatcccacagcgcctggtcgataccggcgatggcgctcattaaaatcgggccgccgcggtaaaagcccgcgcggtacatcacctgccacaggtcgttaatccgcgccggatcctggcctatgagataatcgccgagctcatgcaccgccgcctctacggtgcgcgcgcgcccttcaatcacgggctcgccccagccaaccacgccttcgtcggtttcaatttttagaaacatccagcgcgggggtaaacgatacgtggtgagtttggttattttcattgcactgcctctcgatacgctttaacaaatgctgccgcctgccgttgggtacgctctacggattggccagcgcgatagagatcgctgcccagcccggcaccggtacagcctgcttttatccactgcgccagattttccggcgtcacgccgcccaccgcaaaaacgggcacctccggcggcaaaacggcctttagcgctttgatgtagtcagggccaaaagccgaagatgggaagactttcaacgcctgagccccggcgtccagcgcggcgaacgcttccgtcgccgtcgcgcatccggggcaaaccgtcatgccgtagctcaccgcacggcgaatgacctcgggctgaatattgggcgtgacgataagcctgcagcccattcgggcaagctggtccacccgctctgcattaagcacggtgcccgcgccaatcagcgccttatcaccataagcctcaacaacggcgggaatactcttttcccactgcggtgagttgagcggaatttcaacggcgtcgaagccggcgtcgatcgccgcccccacgtgcgccagcgcctcttccggcgtaatcccgcgcaggatagcgataagcggtaagttagtttgccactgcatggatgatgctccttattcctgtctgaaatgcgttgtcgcccgacaccacgatggtctgacggccaatggcgctcagtgcctgctgatagcggttcgccagcgtctcgccggcgacaatggtgacctgctggtcgcgaaagcgttggctcagggtggcgacttccgcgccaatcagcagtcccgacagaaactcgccgacatgcgcgcgcggcagcgaatccagcacgtgtgaagcgcgaacctcaaaaagctgcggcaggatgtctggcgaatgcaggccgcgctcaagcccggcgttaaacgcgtcaggagcagagacctgctccggtaacccggcgccgaccagcgagtggcgcagcagcagatgatgcagttcgccggtcatcaccgtgcgaaagtcgttaatttgttggcggtctgcctgcacccatttgcagtgggtgccgggcatcacgtagacggaagaaggggctatcgcccgcgcgccgaggagctgagtctcttcgccgcgcatcacattatggttatcgtcgcgagagacgctgagtccgggaataatccagaccttgtcgctaacggcagttaattgttcaccaatggcggagaaatgaacgggaaccggcaagtagggtaccgcctgccagccgacgttactgccgaccattcctgccatcaccgccggggtcgcgccgtcgcgccagccccgggttatttcgctaaacaccgcggcgggggagtgtccgttcagacgcgtgacgcctgcttccgattgcctgctctccaggcaccgttcgccctgatagagccaggcgcgcaggttggtcgatccccagtcaattgcgatgtagcgagatgtcatgtgatttcctttaaccttcgtgtcgagctggcgatcatggtgagcgccgcctgctccgccgcttcgctgtcctgatgccggatggcgtcaaacagcgccttatgttcctggagcgttttcggcatgttggcctcatcgcccatccacgttctttcaaataccgcccgctgtagcgagctgatcgccacgttgagctgctgcagaaccgggttatgcaccgactgcagcaccgcctcgtgatagcgaatatccgcttcgttaaacgcttccctgtcctggttattggcgatcatgtcgttgagcgcttcttctatttgcgccaggtcgctcgacgtcgcgcgctctgccgcccagcgggcgatcgcgggttcaaccaggttacgtacctcgctcatcgcgctaatcagccgcgggtcgtaatcactctccagcacccactgtaaaacgtcggtgtcgagataattccactggttgcgcggggtaacgaacgcgccgcgatagcgcttcatttcaatcagccgtttagccatcaacgaacggaacacttcgcgaatgatattgcgcgaggtggcaaactcctcacacaggtcggcttcagcgggcagcgcagagccgggaacgtatttgccgctgacaatctgcttgcccagcgtgatgacgatgcgatcggttttattgagagtcatggaaagtccttgtgctctggatgtctctctactttaccgcgacaggcggttttaaccgcaactttgtagtactaacgtgatgtcactcgtcattgctatggacacaatgtagtacaacacaaacatgttgtactacaatttagatcacaaaaacgacaattcggtttggtgattttgcggcggggtaaactcaaggcataaaaaaacccgcgattaacgcgggtttttcagaaagagatttttagtttaagacatatttttcaatagcatatgccacaccgtcttccagattggatttggtgataaagtttgccgcttctttgacggccggaatcgcgttatccatcgccacgccgacgccagcgtattcaatcatcgcgatgtcgttttcctgatcgccaatcgccatcacctcttccggctggatgcccagcgcatcggccagcgatttcacgccggtacctttggtgacgcgtttatcaagaatttcaaggaagtacggcgcgcttttcagcacggtgtacttctctttcacctcagccggaatgcgggcgatagccttgtccagaatcgccggctcatcgatcatcatcactttcagcagctggatattcggatccatcttttcggcttcgcagaagaccagcgggatcgtcgccacgtaggattcatgtaccgtgtaatagctcacatcgcggttcgcggtatacagggtgttacgatcgagcgcgtggaagtgggagccgacatcgcgggccagctgttccagatagcggtagtcgtcgtagcccagcgcggtttgcgcaacggtactaccgtcgctcgccttctgcactaaagcaccgttataggtgatgcagtaatctccaggctgctccatatgcagttctttcagatagctgtgcacgccagcgtaaggacggccggtggtcagcaccacgttgacgccgcgttcacgggctgcggcaatcgcggttttcaccgcaggagagatagtatggtcaggcagcagcagcgtgccgtccatatcgattgcaatcagtttaatagccatgaaatccccgggtaagatgagtccttactcatgctaacgcgattaagcccacaaaaatagagctacattgcgcagcagaacccccccttttaggcaagatccggggaacggggtcttactcgcgggtgagcacgattttgccaaacgcaccgcgatcgaggtgttcaagcgcctgtgcaagctggttaaagcggtaacggtgctcaatcaccggtttcagcctggtcacgtcaacggcgcggacaaaatcttccagtgcgcgacggtgccccacgccaataccttgaatcaccggggatttcagcaacagttcgcctgccggtagcgagatttcactgccggccagcacgccgatgaccgaaatacgcccatgaaccgccacggcgcgcagggaatgcctcaggttctccccgccaacggtttcaatgatgtggtcgatgccgcgatcgttcgtcagttcgtatatcccttcagcccagtcgcccttaagccggttgatgccataatcggcgccgagttgtttggcccgcgccagtttttcatcgctcccggacgtgacaaaaacctctgccccctgcgctttggcaatttgcaaagcgaatatcgccacaccgcccgtgccctgcaccagtaccgattgcccggcgcgtaaatgaccgcgctccaccagcgcgaaccatgcggtaagcccggcgcacggtaacgtgctggcctcgacgtcatccagggtttccggggcggccaccagcccgttttcattcacaatcacgtactcagacagcatgccctggaagtaaccgccggtcgttttatagggcaaagtgcgggcgtccgctgttggcctaccgtcgatccactccgggaaaaaggtcgagatgacgcgagcgccgggtgtgaaacgcgtgacgccctcacccgtactttccaccacgcccgccatatcggacgccggcgtaaacgggaaggaaagcgcaatcggcatggtgccttcaatgaccattttatcgcgatagttgagcgcaacggcattcacccgtacgcggacttcacccggccctggctgcggaacaggcgcctggatgagtttgaggttgtcgcgcccgagggcgtccatggaccagcgttgcattgtctcagtcattttttctctcctgccattaaataagcttcaggagcgacagtctaccgttgactcagggtcgccagtggcgataagttttcccattattgatgaaagaaaagatacaatctatgaccgatacgctgaaggatattccggtttttgtggccgccgttgaggcggggagttttgctcaggccgcaatccgtttgcacttgtcgcgttcggcggtgggaaagagcatcgctcgccttgaggagcgactgggggtacgtctgtttcaacgtaccacccgcagccagagcctgaccgacaacggcgcccttttttatgaacactgcctgcgcgcgctggaggaaattcggggcgcagaattgctgctggaaacggggaaacagcaggtcagtggccgcctgcgcgtggccatgccggtgctgtttggccgccagtgcgtcgccccgctgctgatcgcgctggcgcaggaacatccaggccttgagctggagatgtcattcagcgatcgcgtggtggatctcgtcgaggaagggtttgatatggcggtgcgtaacggcacgcttcaggacagcagcgttctggtcgcccgaaggctgggagaacaccgcatggtgctgtgcgccgcgccggattatctgctgaagaagggcacgccgcaaagcgttgatgatttaccccatcatgcggccattaactatctgcaggccggcagagtactctcctggcaactgatggatagcgaaggtgcctcgcacaccttcactccccgttcatcgctcaatatggatgatttgcaggcgatctgcgacgctgcactggccggacacggcattgcatggctgccctgctggatggtcagcaaagaaattcatcagggaaaactcgttccgctgttaaagcaggcgccggatgtgcgcttcgacgttcacgcggtctggcaacagacgccgcatctaccgctgagggtgagaattgccgtcgatacgctcgccagccgcttaccgtccgtgatgtcgctggacaggcctgcgcccacaaaaaagccgcgctaaacgcgcggcctgagtatggcggtgtacgacgattaaatatcgatgtttgccgctttgagggcgttctcttcgataaaggcgcgacgcggttcaacggcgtcccccatcagggtcgtgaacagctggtcagcggcaatcgcgtccttgacggtcacgcgcagcatgcggcggctgtccggatccatggtagtttcccacagctgatccgggttcatctcaccaagacctttatagcgctggatagagaggccgcgacgggactccttcaccagccagtccagcgcctgctcgaagctggcaaccggctgacgacgttcgccgcgctcgataaaggcatcgtcttcaatcagaccgcgcagcgtttcgcccagcgcgcagatacggtggtattccggcccggtgacaaactcgtgatccagcgggtagtcggtatccacgccgtgggtacgcacgcgaacgatcggctcaaactgctgcagctcggcgttctcgcggacatcaaatttccactggctgccgtgctgctctttctcgttcagctcgctcaccagggcgttgatccagcgcgttacggtctgctcgttcgccaggtcggcctccgccagcgtcggctgatagataagctctttcagcagggctttaggataacgacgttccatacgcgtaatcattttctgcgtggcgttatactcggcaaccagtctctccagcggctcgccggctaaggccggcgcgttggcgttggtatgcaaagtggcgccatccagcgcgatggagatttggtactgatccatcgcttcgtcgtctttaatgtactgttcctgcttgcctttcttcactttgtacagcggcggctgggcaatgtagacgtgtccgcgctcaacgatttccggcatctggcgatagaagaaggtcagcagcagcgtacgaatgtgcgagccgtcgacgtccgcatcggtcatgatgatgatgctgtggtagcgcagtttgtccgggttgtactcatcgcggccaatgccgcagcccagcgcggtaatcagcgtcgccacttcctgagacgcgagcattttgtcaaagcgcgctttctcaacgttaaggattttacctttcagcggaagaatcgcctggttcttacggttacgcccctgtttcgcagagccgcccgcagagtccccttccactaagtacagttcagagtgcgcggggtcgcgttcctgacagtccgccagcttgcccggcaggccagccagatccagcgcgcctttacggcgagtcatttcacgcgcgcgacgtgcggcttcgcgcgcgcgcgccgcgtcgatgattttaccgaccacgattttggcgtcagacgggttttccagcaggtattcgttcagcagttcgttcatctgctgttcgaccgccgatttcacctcggaagagaccagcttgtctttggtctgcgaggagaatttcggatccggcaccttcacggagaccacggcaatcaggccttcacgggcatcgtcgccggtggcgctgactttcgcttttttgctatagccttctttatccatgtaggcgttcagggtacgggtcattgccgcacggaagcctgcaaggtgggtaccgccgtcgcgctgcggaatgttgttggtaaagcagtagatgttttcctggaaaccatcgttccactgcagcgcaacttcaacgccgataccgtctttttcggtggagaaatagaagatattcgggtggatcggcgttttgtttttgttcagatattcgacgaacgctttgataccgccttcgtagtggaaatgatcttctttaccgtcgcgcttgtcgcgcaggcgaatcgacaccccggagttcaggaacgacagctcgcgcaggcgttttgccagaatctcgtattcgaattcgaccacgttggtaaaggtttcgtagctcggccagaagcgaaccatggtgccggttttttcggtttcgccggtaaccgccagcggcgcctgcggcacgccgtgggcataaatctgacggtgaattttgttatcgcgctgaatgaccagctccagcttctgcgacagggcgttaacaacggaaacgcctacgccatgcagaccaccggaaactttatacgagttatcatcgaatttaccgcccgcgtgcagaacggtcatgatcacttccgccgccgacacgccctcttccgggtgaataccggtaggaataccgcggccgtcatcctgtacggagacggagttgtcgctgtggatagtaacaacgatgtctttacagtaacctgcgagcgcttcgtcgatagcgttatccacaacctcgaataccatgtggtgcagaccggtgccgtcatccgtgtcgccgatatacatacccgggcgcttacgcaccgcatccagccctttcaggactttgatactggaggagtcataagaattcgacatcaacgtttctcgctcatttcatcttaggttaatccgctattttacccttttccacggtaaacatcttcgaattttcgtccgacatgtccataacgtgttcagcgctaatggcgctgacgaaaacctgcgactgcgtggcttttaagcggctggccagcagcccgcgccgagcgtcgtcaagttccgaggcaaaatcatctatcaggtacaggcagcgccgcccgctttcacgggtcagaaactcgccttgcgccagtcgtagggcgcacatcagcagcttaagctgcccgcgcgacaatgtatcctctaccggcgcgccgtcggcacgaatgcggaaatccgctttgtgcgggccgtgggcggtataggttagcatgcggtcgcgttcgaaatttcgctccagcacctcggcataatccgtttctttctcccagccgcgctggaaagagaaggtgagagcaaactccggtaaaaactgccgacaggtatccgccatgtcttcgacgatagcggcactgtattcggcccgccagcggctgatttgctccgccagcggtatcagctccagatcccagggccgcagctgcgcatagcggctgacctgacgcagcgcggcgttgcgctgcttcaccagccgcttcaggttgctccaggcggtaaagaatccggcttcgttgtggaagcatccccagtcaaggaacgctcttctgtatttggggccgccgttgagtaaagtaaacccctcgggcgtaatcagctgcatcggcatcaggtgcgccagctccgccactttatgcccgtcagtgccatcgatacgcaccttgctgtcgccctgcttatcttttgtcagaccgatagatacttctcgctcttcgccctgcaggcgaccgtgcaggacaaaggactcctgctcgtgacgaatcacgcggccaatctgcaaactacgaaacgcccgaccatggccaagcgtgtagatagcttcaagtacgctggttttgccgctgccgttggcgccaaccaggaagttaaagccgggagatagggcgagatccgcattttcaatattgcggaagtctttgattagaagtcgggatagcgacatatcagctcataaccagggcgttatcggcgcagttagtctggttacggccagcgcgcagcaaccggagcgtactaaagtacgtgaggattgcgagcactgcccggagccagaataacaagtaagatagcccgatattttctacagcctcataggcatgacgacataggctgcggattgcgaagccgcatcctcaatctgcacgctcgacacggaatcggtcagcagaatacgcacattctcgcacttcagcgcgttaagcacatccagtacatagctgacgttaaagccgatttccatctcagtcccggcataggtgacgtccagaatctcttccgcttcttcctgttccgggttattggcggtgattttcagctgattttcactgacgtaaaggcgcacgccgcggaatttttcgttagaaagaatcgccgcgcgggcaaaggcctgcttgagaatatcgcagccggcatccaggtgcttatccgggtttttcggcagtacgcggcgatagtcagggaaacgaccatccaccagctttgaagtgaagataaagtcgccaacgtgagcgcggatattgttgctgccgatctgcacgcgcagcggggtatcgccgccgtcgagcatacgcatcagctcaatcacgcctttacgcggtacgatcaccgaatgattgggcagggactcttccagcggcatcgagcaaaccgccaggcggtggccgtcggtcgccacggtgcgcagttcgctgccttcggtttcaaacagcatgccgttcaagtaatagcgaacgtcctggtgagccatcgaaaactgcgtcgcctcaatcaggcgcttcatggtcgcctgcggcagggtaaattcaacttcgctctgccagtcatcaaggttggggaaatccgctgctggcagcgtagagagcgagaagcggctgcgaccggaacgcaccagcatacgctcgccttccagctgtaccgcaatctctgcgccttcaggcaggccgcggcagatatcaaaaaatttacgcgccggaacggttgttgctcccgcttcgtgcggctgaatcagcgcaacgcgcgcgaccatttccatttccagatcggtaccggtcagcgacagcgcgccatcggtaacctgaaggagcaggttgccaagaatcggtagcgtcggacgaccacctaaaggaccgctcacctgttgcagcggttttaataaatgttcacgttctacggtaaatttcatagcgtcacgaggataatgttctgattaaattggaaaaatcttctttgatatcgtggctttcttcacgcagttgctcaatcttacggcaagcgtgcaggacggtggtatggtcgcggccgccaaacgcatcgccgatttccggcagactgtggttggtcagctcttttgccagcgccatcgccatctggcgggggcgcgccaccgaacgggagcggcgtttagacagcaggtccgctaccttaattttgtaatactccgccaccgtcttttgaatattgtcgatggtgaccagtttttcctgcaaagccaacagatcgcgcagcgcttcgcgtacgaaatcgatggtgatcgcccggccggtaaagttggcgttggcgataacgcggttcagcgccccttccagctcacgtacgttagagcgcaggcgcttggcaatgaagaacgccacttcgcccggcaggcggatgtcgttttcatcggcttttttcatcaggatcgccacgcgggtttccagctcaggcggctcgatcgcaaccgtcagcccccagccgaagcgtgatttcagacgatcttcaaccccgttgatctccttcggatagcgatccgacgtcaggatgatctgctgattgccttccagcagggcgttaaaggtgtggaaaaactcttcctgcgagcgctctttattagcaaaaaactgaatgtcatcgatcagcagtgcgtcaacggagcggtaatagcgcttaaattcttcaatggcgttgttttgcagggcttttaccatgtcctgtacaaaacgctcggagtgcatgtaaaccactttcgcattgggtttacgcgccacaattccgttacccaccgcatgtaaaaggtgcgttttacccaggccggtgccgccataaagaaacagcgggttgtacgcgccgccgggattatccgcaacctgacgcgccgccgcgcgagccagctggttggatttaccttcgacgaagttatcaaacgtatgtttgacgttgacgttagagcggtaggtcggttctgccggcgccggaacgttatcccagcccggacgcacgatagtgggcgcaacgcgcgccgtctggatctgctgcgcaggcgctgcggccgcaacgcttaccgtacctctctgcatctgaacggcaggcttagcgcccacctcaaaccgcagctgtggggcatccgcaccgcaaaaatcattgaggagtccattgatattattgaggtatttatcccttacccaatcgagcacaaaacggtttggcgcatacagtgccagcgtgttatcgctcaattccgcctgcaaagggcgtatccacatgctgaattctgtggctggtaactcatcctgcaatcgggcaagacactgctgccaaagcgaaagtgacacggcggactccactcgaacaaaaatcgatatataaagagaaactgaaacaatcgtgattgttggcacacgtcgacaagaccctgcatagccgaaaagcccctgcacaaaaggggtgacgtgcgaaccgctatctgcggttattacccgatgcggatctctggatcccgatcgggaccggggatcatagcctaaactgagaaagagatcttgtgtttctcaacagattcttcccgatttatccacaggaaggatcgaagctgggtaagtgtaatcgatcctggctggagtggggcacgatttcagccgcatattggaaaaattaatgaactatcctggttttgggcttaatcgatctaacaaagatcctttgcgatccttgcgctttatccaccaggtcgtataatccaccacccggcgcgtaaagcccgttttccgcagcgtgccatcgcctgttttttgtgcggcaaggtgcgagaaataaggaaagagaattgactccggagtgtacaattattacaatccggcctctttaatcacccacgctgaggcgtaggccgttcgaaattcgttcggatttacgcgaaagtcagtgaaattattcaagtttaggtagaaatcgccatgaaacgcacttttcaaccgtctgtactgaagcgcaaccgttctcacggcttccgtgctcgtatggctactaaaaatggtcgtcaggttctggcacgtcgtcgtgctaaaagccgcgctcgtctgaccgtttccaagtaataaagctaaccctgagtggttaagctcgcatttcccagggagttacgcttgttaactcccagtcatttcactttcgtcttccagcagccattacgggctggcacgccgcaaatcaccatcctcggccgccaaaattcgctggggcatccccgcatcggtcttaccgtcgccaagaaaaacgtcaagcgcgcgcatgaacgcaatcggattaaacgtctgacgcgtgaaagcttccgtttacgtcaacatgaactcccgccaatggatttcgtggtggtggcgaagaaaggggttgccgacctcgataaccgtgctctctcggaagcgttggaaaaattatggcgccgccactgtcgcctggctcgcgggtcctgataggcctgattcgggtctatcagcgcctgattagtccgctactcgggccgcactgtcgtttcacgccgacctgttctcaatacggaattgaggcattgcgcaggtttggattgataaaaggcagttggttgacggtgaaacgcgtattaaaatgccaccctttacaccctggtggtgacgatcccgtcccgcctggaccatttgataccagagaacactaacgatggattcgcaacgcaatcttcttatcatcgctttgttgttcgtgtctttcatgatctggcaagcctgggagcaggataacaatcctcaaccccagcagcagaccacgcagacaacgaccacagcaacgggtagcgccgccgaccagggcgtaccggccagtggccaggggaaactgattacggtaaaaaccgatgtgcttgacctgaccatcaacacccgcggtggtgatgttgagcaagcgctgcttctggattatccgaaagagctgaagtcaactgagccgttccagcttctggaaaccacgccgcagtttacctatcaggcgcagagcggcctgaccggtcgtgatggcccggacaacccggctaacggaccgcgtccgttgtataacgtcgataaagatgcgtttgtgatggctgatggccagaacgaaatcgtcattcctctgacgtacaccgataaagcaggcaacgtattcaccaaaactttcaccctgaagcgcggtgaatatgcggtgaacgtcggctatagcgtgcagaacgccagcgaaaaaccgctggaactgtcgacctttggccagctgaagcaaaccgccaacctgccgacgcatcgcgacacgcagaccggcggtctgacgacgatgcacaccttccgtggcgcggcgtactcaacgtctgaaacgaagtacgaaaaatacaaattcgatactatcgtcgataacgaaaacctgaacgtcagcaccaaaaacggctgggttgccatgctgcagcagtactttactaccgcatgggttccgcagaacaccggtactaacaacttctacaccgcgaatctcggcaacggtattgtggcaatcggctacaaatctcagccggttctggtgcagccgggtcaaaccgataagctggaaagcaccctgtgggtcggcccggctattcaggacaaaatggccgccgttgcgccgcatcttgacctgaccgtcgactacggctggctgtggtttatctctcagccgctgttcaaactgctgaaatggatccatagcttcctgggcaactggggcttctccatcatcgtcatcacctttatcgttcgtggcatcatgtacccgctgactaaagcgcagtacacctccatggcgaagatgcgtatgctgcagccgaagattcaggcaatgcgcgagcgtctgggcgacgacaagcagcgtcaaagccaggaaatgatggccctgtataaagctgagaaggttaacccgctgggtggctgcttcccgctgattatccagatgccaatcttccttgcgctgtactacatgctgagcgcctcggttgaactgcgtcatgcgccgtttatcctgtggatccacgacctgtctgcgcaagacccgtactacatcctgccgatcatcatgggcgcgacgatgttcttcatccagaagatgtctccgaccaccgtgaccgacccgatgcagcagaagatcatgacctttatgccggtcatcttcacggtgttcttcctgtggttcccgtccggtctggtggtttactatatcgtcagcaacctggtcaccattattcagcagcagctgatttaccgtggtctggagaagcgtggcctgcatagccgcgagaagaaaaaatcctgatactcttgaattattttgagtatttacggtaacgttaatgccagagaaggcggtcattagaccgccttttttacatctacatagagagtcaccatgagccataacgacactatcgtcgcccaggcaaccccaccgggacgcggtggtgtgggcattctgcgcatctctggcctgaaggcgcgcgacgttgcgcaggcagtgctgggcaagctgccgaagccgcgctatgccgactacctgccgtttaaagacagcgacggcagcgcgctggatcaggggattgcgctgtggttccccggcccgaactcctttaccggcgaagacgtgctggagcttcagggccacggcggccccgttatcctcgacctgcttctgaaacgcattctgacgctgccgggcgtgcgcatcgccaggcccggcgagttctccgagcgcgcgtttttaaacgacaagctcgacctggcacaggcagaagccattgccgacctgatcgacgccagctccgagcaggcggcgcgttctgcgctgaattcgctgcagggcgcattctccactcgcgtaaaccatcttgtggaagcgctgacgcacctgcgcatctacgtggaagcggccattgatttcccggacgaggagatcgacttcctctccgatggcaaaatcgaagcccagctaaacgacgttatcgccgatcttgacgccgtgcgcgccgaagcgcgccagggcagcctgctgcgcgaagggatgaaggtcgtcattgccgggcggccgaacgccgggaaatcaagcctgctgaacgcgctggcgggccgggaggcggctatcgtcaccgatattgccggtaccacccgcgacgtgctgcgcgagcatatccatatcgacggtatgccgctgcacatcattgataccgccggcctgcgcgatgcgaacgatgaggtagagcgtatcggcatcgaacgcgcctggcaggagattgaacaagccgatcgcgtgctgtttatggtcgatggtaccaccaccgatgcgaccgatccggcagatatctggccagattttatcgcccgtctaccgaaaaacctgccgattaccgtggtgcgcaacaaggcggatatcaccggcgaaacgctggggctgagcgaagtgaatgaccactcacttgttcgcctttcggcgcgtaccggcgagggcgtagacgtgctgcgtaatcatctcaagcagagcatgggctttgaaaccaatatggaaggcggctttctggcgcgccgccgccatctgcaggcgctgtccgacgccgcagaatatcttcagcagggtaaagcgcagctgctgggcgcctgggctggcgagctgctggcggaagagctgcgcctggcccagcagagcctgagcgaaatcaccggcgagtttacctccgacgacctgctgggacgcattttctcaagtttctgtatcggtaaataagctcagtatgtgagcattgactaacccgcattaacgtcctgttaaagcgggttaatttttttcctttagcgtcttcacggcgtatcgctttgtctattacccttatcggtaccccccacttaccggatacgacaatgatggctgattacacctttattgataccgtcccttcggcggaagatttttgtcgcctgcgcgtcatatcaggtatgtcgccgcgcccgctggaaggcgcccgcgcgggtctgccgcgtagctgctacggcgtgcatatcctctatgcgggcgtgcccgttggtatggggcgcatcgtcggcgacggcgcgctgaactttgaaatcgtcgacgtcgccgtggacccggcccatcagggaaaaggtctcggtcgccagatcatgcagaaaatcgtctcctggctggatgaaaacgcggttaaaggggcatacgtctcgctggtggcggatgttcccgaactgtacgccaaatttgggttttccagcgtcaggccagaaagtgaaggtatggccaagatctggaaataatgcgggacgcgatcgctttattggaaatatcaaaaagcgatataaaaacaaataattaaattatctccgcacatcttccaaccgtttttcctcccgggaaatcgttgttgtccaaatggcaactcgtactcccgcacgaaccccactattctgtacggcattcttatgcgaggggttctatggcacgctttcttatctgcagttttgcgctggttctgctttatccatccggcatcgatatgtatctggtcggtctgccgcgcattgcgcaggatctgggggccagtgaagcgcagctgcatatcgccttttcggtttatctggcgggaatggccgcggcaatgctgtttgcgggtcgtatcgccgataaatcaggacgcaaaccggtggcgattttcggtgccgtggtcttcatactggcctcccttctctgctcgcaggcgcaggtcagcgcccacttcctgattgggcgttttattcaggggattggcgcgggcagctgctacgtcgtcgcctttgcggtgctgcgcgataccctcgacgatcgccgccgggcgaaggtactttccctccttaacggtatcacctgcattattccggttctggcgccggtactcggccacctgattatgctgaaatacccgtggcagagcctgttctataccatgacaggcatgggcgttctggtgggactgctctcggtctttatcttgcgggaaacgcgccccacagccgcgccacatgcggcgatgcagcaaaataatgtccccgagtcgctgcttaaccgcttttttctcagccgaataatcataaccaccctgagcgtgacggctatcctgacttacgttaacgtctccccggtgctcatgatggaagtgatgggcttcgatcgcggcacctattccatggcgatggcgctaatggcgcttgttagcatggtggtgtcgttctcaacgccgttcgctttgacgctatttaagccccgcaccctgatgctgacctcgcaggtgctgttctttatcgccggcgtgctgctgagcctctccaccagccagacgatgacgatgctgggtctggggttgatttgcgccgggttctccgccggctttggcgtagcaatgagtcaggcccttgggccattcaccctgcgcgccggcgtggcgagttctgttttgggaattgctcaggtctgcggctcttcactgtggatttggctggcggctatcatcggactcagcgcgatgaatatgctgatcgggatacttattgcctgtagcatagtgagcattgttctgattatggtcacctctccggcgcgggccgcgcaacgctatgaagaaacccctgtcgagtctcgatcttaacctgctgctgtgcctgcagctcttaacccaggagctcagcgtcacccgcacggcgaagcggatgaacgtttcgccgtcggcggtgagtaaatcgctggctaaactgcgcgtctggtttgacgatccgctgtttgtcaaaacgcctctgggactgtcacccacgccgctgatgagcagtatggagcaggatctggcggactggatgcagatgggtaatcagatcctcgataagcctcatcataccatgccgagcgggttaaagtttgagctggcggcagagtcgccgctgctgatgatcctgctgaatacgctttcgcagcggatctaccagcgctatccgcaggcgctgatccgcctgcgtaactgggattatgattcgctggatgcgattattcgcggtgaagtcgacatcggtttttgcggccgggaaacccatcctcgctcccgtgaacagctcagcctgctgccctggtatatcgattttgaaatcctgtttaccgatctcccgcaggtatggctgcgcgccgatcatcccgcgctgaacgaagagtgggatctggacactttcctgcgttatccgcatatcaatatctgttgggaacaaagcgatacctgggcgctggatgatgttctgcacgatctggggcataaacgcaccgtggcgttgaccgttccgggttttgagcagtcgctgtttatggcggcccagcctcatcatacgatgttggccaccgccccgcgctattgccagcgttacaatcaacagcaccatctgccgctggtttcactcccgttgccgctggagccgtcccagctggagaaaatacgcgtccccttcaccctcctgtggcataagcgcaacagctacaatccgaagatcgtctggctgcgagaaacgctcaggcagctctatgtggaaccgctctagcgttggattagcccgtcttgcgcaataaattgtaaaatttatgcaatttattgcgcaaggagtgatttccgcattaaaacctggcaattctgagcgataatataattcgcaatttttatcattgaccattaatcacggagcgacgaatggcaacgcattttgcaagagggatactcaacacccgggaaccgctatctacacgcctgtcagcggcctgtcatcaatccgccagccgcctgcctgagtaccgacaaagccgctatcgcgcatcacggtcactcctcgcagaactcctctttatgctgtatggcatcagcgaacttcctgaaattattgacgaagagaatggaaaacccgctttccgcgacgaaaatctcccgcgtttttccatctcctatgccgggaatattgtcggcgtcgcgttatccaccgaaggtgattgcggcctggatatggaattaccgcacgcctcccgtagtttacatgcctcgcccgacgccgaccgctacgtctttaacagtaatgagcgggtatggattagcaaccagcacgatcccgatgaagcgcgcgctcagcttgacgcactccgcaaaagcgtcatgaaactgaccggtgaaaacgccgttaacctccagcttcttccgggctccggacgattacggacaagcgggacgcagtcaatcgaagcggtgtgcgatgccgaaacggtgctggtctggtccatcgccgccagtccggatatcggccagctgaaagtctgggaatataatggtaaagagggctggcgtagcctgcccgacgcgcaggctcgcgccaaagagccgtccgcccggctgatgcgtttcactcatttaccggtagaaaaagccttctccctcaactgaccggataacccggccatcatgatgcaaaggagcaatcatgtctgatacgttgaaagttgttacgttactcggaagtctgcgcaaaggctcttttaatgccatggtcgcgcgtaccctccccggcatcgcgcccgcaggaatggcggtttccgcgttaccgtccattggcgatattcctctctatgatgccgacgtccagcaggaagagggatttccacaaagcgttcaggatatcgctcagcaaattcgcgaggctgatggtgtggttatcgttacgccggaatataactactcggtgcccggcggcctgaaaaacgccatcgactggctgtctcgcctgccggaacagccgctatccggtaagccggtactgattcaaaccagttcaatgggcgcgattggcggcgcgcgctgtcagtatcatttgcgtcagattctggtattcctcgacgccatggtgatgaataagcccgaatttatgggcggcgtgattcagaacaaagtggatccgcaggaggggaaagtcgtcgatcagggcacgctcgatcatctgagcggacagcttagcgcttttgccgaatatattcagcgggttaaagcctgacagacgccgtcacacttgccagaacggctgagtgtgacggcgcgggtattaatgcacgtcaataaatacaattttcagcacaaacagcagcgaaaccacaatcacgcatgggctgaggtcgcgcagtcgaccggtaccgatcttcattacgcagtaagagataaagcctaaggcaataccttccgtaatggagaagctaaacggcatcatcacggcggtaataaatgccggtactgattcggttaaatcatcccacttcacgcgcgccaggctggaggtcatcaggacgccaacgtaaatcagagcgccggctgcggcataggccgggaccatacccgccagcggcgacaggaagatcaccagcaggaacaagagaccaacgaccacggcggttaagccggtacgtccgcctacggaaacgcccgaggaagattcaatataggcggttacggaagaggtgccgataaaggagcccgcaacggacgagacgctatcgacaaacagcgcctgcttcatccgcgggaacttgccctgcgcatcggccagaccggctttatcggtcacgccgatcagggtgccggaggagtcgaacaggttcaccagcataaacgagaagatcacgcccgccaggccgagattcagcgagcctgccaggtcaacatgcccaatgaccgtcgtgacgctcggcggcatggatacgatgccggtgtagtgaacgtcgcccagcagccagcccagcagcgtggtaaccacgatagaaaccagcaccgcggcgtggatgttgcgggaagccagaatcgcaataataaagaagccaagaatgcccagcagtacgctgtgggacgtcaggttgccgatgctcaccagggtttccgggttggcgacgatcacgccggcgttcttcaggcccatcataccgatgaacaggccaataccgctggtgataccgatacgcaggctaaccgggatattggcgatcatccagtagcgtacgcggaaaatcgtcaacagtagcaggccaaccgccccccagaaaatcgcgcccatcccgacctgccacggcaggcccattgcctgtaccacgacaaacgcaaagaaggcgttcagtcccatcgccggcgccagggccaccggaaggttagcgaacaggcccatcatgatgctgccgaacgcggcgatcagacaggttgtgacgaacacggcgctggtatccatacccgccacgccgaggatctgtgggttaacaaaaacgatgtacaccattgtcagaaaagtggtgaaacctgcaatcgcttcggtgcgtgccgtcgtgccgtgttcacgtagtttgaacacgcgctccagcagacccgggccagatgactggctggtttgttgttgactcattatcggtttccgaacaaaggagggaaaattcgtcgctatcctataccaaaatgcgacaataagggcggttgtgagatactttttttcatcgattttgcttatacggcaacgattgcgtctcactaatcagcaagacgaaaacgttaacttattaaaatggaaacgacatgacccaaccagaagcagtatttttcgactgtgacggcacgctggtcgacagcgaggtgatctgctcccgcgcctacgttcacatgttcagggaattcggcattacgctggatttagacgagatttttaagcgcttcaaaggcgtcaagctgtacgagattatcgacaccattaacgcggagtacggcgttaatctggacaaggcgacccttgagccggtgtaccgcgatgaagtcgcgcgcctgtttgatactgaactggaagtcatttctggcgcacaggcgctgctggacgcggtcaacgtgccgatgtgcgtggtctccaacggcccggtgagcaaaatgcagcactctctcggtaaaaccgcaatgctgcaccatttcccggagcgtctgtacagtggctacgatatccagcgctggaagcccgatccggccctgatgctgcatgccgcaaaagcgatgaacgttaacgtcgagaactgcattcttgtcgacgactccagcgcaggcgcgcagtcggggatcgccgccggcatggaagtgttctacttctgcgccgatccgcataataagccgatcgaacatccgaaggtgacgacgtttacccgcctggaagagctacctgagctatggcaggcgcgcggctggaatataacgcgataaacctggagcgtagcgctatcagggcgcgtcccgcctgcgctacgctgaaagtggattacggttgactcaattccgcagctgccgctttatcagccacaatcaccagggaaggatgtaatttcaacaccgaagccggaacccgctcgctgacttcgccttcaatcacctgccttagcgcctgcgcttttgccgcgccgctgacgataagcagcaggtttttcgccgccatgacgctttttggccccatcgtgacgtagctatccggcaccgcagagaagtcgccgcccatctcgccgtgagcgacaagatccaccatatcgccgacgatagggacttccaccgtcgcatcgtggaagcgcgtggtattcggcaaattaccgcaaaaatggccgtcagcgccgaggcccatcactatcagatcgaggcccccttcgtcctgtaaccgctggtcgtgatgcctgaagttttcatggctgagcgggtggatattctcttcagggatttgcgcgggggtgaaaaacaggctgcgcagattagaaatggtcacgccttcacgatcctgtccgcggaacggaatctcgtcaaagttgtaataatggacctgagaatagaacgatttacctttaaccgcgtccgtcagatgttcatacattttcttcggcgtacttcctgccgttaccgccaggttcaccctgcgcggcgcggtgatgtagcccagaacgtgatggctggcgaccaggctcatctcggcataatcttccgtcacgattaatttcatattgtctccctcaaggtattgaagataaggagccagcgaactggctccttcatgttatttgaacaacttctgtacaaattcggcgtaggcgggacgccagacgtccatttcatggttcaggcccggatactcatggtaatcaaagttgattttctgcttctccagatccgctttcagcccggcgatatccttgccggtaaccacgtctttctcgcccacgacgacggtaaagttacgcagctgcttgttgatcgtctgtgggttgtgtagctgcgcctcgacgccggcatccggtaccgtggttgtcgttacgccgctgaacgtcgccagccagccgaagctctccagatggttcattccggagaccagcgcctgataaccgccctgcgacagcccggcaagcgcccggccgtccgcgtctttacgcacgttaaagcgcgcatcaatcagcggaataatatcgttcatcagctctttatcagccgctttcgcattcagcggatagaaggttttacgccgctcctgcggcgggaagttttccgcaaccgcgtcaggaatatcggtttcggtatccggcaccaccaccagcatgggcttgattttgccttccgccagcaggttatccatgatttgcggaatacggccctggtcgatggccgacagtccgctgtcgccaaaaccgtgatagaaatagagcaccggcagcggttcgccggtaccggtatagcctggcggcgtccacacgtagacgcgacgctcagcgttcagcgcctttgaatgataggtcagggttcgtagctcgccgtgagcgaccgcgcgatcgtcaagaatgctgccggggaccaggatcaggctggtattcacctgacgctgtggcttctgatagcggctaccggtatcgacggaacggaatccgtcgacatcaaaatagtattcgtagagattgggagccagcgcatcgcttttccatgtccagaccccctgctcatctttactcatatcatgcgagacaaaggtatccggcgttgcccccgttaccacggacacccgttttgcatccggggcaaacaggcggaaggtgatactcttatcggcgttaacctgggtaatatactggctgaccgggatcgccgcgctcggcgtggccggaaacggcgcggcatgagcggtaaacgccgcgcccgccagcgccagagcgaagtaaatagcatgtcgtttcatcgttaatcctctttagaattttgtcctgaccgttgccagccttaccaccagatttcagcctgagcgccaacggcaaactgatcgttcttaccatcttcaaaaatgctgctggtattgctgttagccgccttatccaggtcgatatccttcgctttaatataagtcgcatagaaacgaatttccgggcgggaggtcagcatactggtattcactttaaaggtatggaacagggtagttttgtagccggattcgttatatttcttgccggtactatctttgttctgctgcttgaaatagcccaattcaacgccggtctgattatatttatcccagatccaggccgggcgcacgacggcgcgaagagactcaaaatcggagtgcgcgccggtctcgtagctgtagacatcattaccaaaggagtaaacgatggcgttcgccataatgatgtcatcactcaaataggtttccccctgcgaggtcaagcgaacggcggtgccgttggtatgatcgccatagtatctgccgttgaatgtggtatacgggctggatcccgcgtagcgcgagaagctgctggcgatggagttatttgccagcaggaaggaaaattcgttaaatccgccgttatcaaatttctgcgttaacgacgtccccgccatccaggtatctttccattcataatatccattattacattcattatatttctcggatgagctctgatttgccgcgacataccggccgctgaccatcaatgacgccttatcccaaagcgggatctctttataacgaatatcaatagtattggtgttaatttgctggcttttggtcaacgtacggttgtagtcatcaacatcctcgcgcaccagcgcgatatcaaatttacccgcgcccactttccagttttcaaggccaacgccggctgcggcatcggttctttgcgttttccagtccagcatctggatttcaattttcggcgcaccgtgcttacccacccagaaatccgcttccggcgcgaatggcaggaaacctttggtgttgacgtacatatcagagaactgcatatagttctcgccgccagcgttatcgccaaaccagccggaggaatactgctgcccgacgttgccgtcaagcatcacgatcgcatcaacccgcttattgccttcctgatagacccgctgcttaagttgtaaatcaaaccagcccgaatattcattaccaaagcgacccagcgagccaatcgcccaggacttaggtgaaccatgggatgcggtcccccagccggaacggtaatagccgttatagctgaagccaatttcatccttcacaaacttgctgaaatccttcattgtcatcgaactataaatggactcgccgttagccgcgggctgttcgtttttcaccagaaccgctgccggttttgcagcgccgccggccggtgcgggtgcgctgacaacctgcgcggacgcactctgctcaggtgcgccaggctgcgtactggcaacccagagtcgatttctggccttctcttcatcttgatatttttttagttcgctctgcgtatccttaagcgccttctccagaagctcaagacgctgttcaacggttagcgattccgccatagcatgggttgtataagcgagcggcgccataataagtatggccgaggtaatcagatttcttttaaacataagttccctttatataaaaacaggtgcaactgaatatcgcgataaaatgtcaactaacgcgaaggcgtatttttatttttctatcgaataaagcttgttaccgaaaaggtgcttccccttaaggaaaaaagaacgttattaaaaccagcactattatttattcggttaataccatcctggtttacccacaaacagccttgcatcaaatcaaaaaaaaacctgaagcaatccccctgcagaaaacagaggaggcttgcttcaggttttgcccgcgcagcggtaacaatccctttcatcggctaatggcggattatctggcaaaaaaaaacctgacatcaccaggttaacggtgatgtcaggttttgcctgcttgcgcagtaacaatccagagttttattcgagccttgccgcaacaagtcacccgattaatgtaccgcattgttacgctattaaaatcaaaccacaattgatgaaattattatttgtgacgacaatcgcaccaattttgttaattaaaaacaggagtaacattaatcataactaattctgataaatcctttatcagaattagtctctgtgatttattactctttaggatctttcccggccagcagtttatccagctcgtcgccgccaacgtgacggaaatcctgacctttgacgaagtagaaaatatattcgcagatgttctgacaacggtcgccgatacgctcaatcgagcgggcgcagaacagggctgtcaggacgcttggaatggtgcgcgaatcttccatcatataggtcatcagctggcgcacgatgccttcatattcctggtcgactttcttatcttcgcgataaatacgcaccgcttcatcaaggtccatacgcgcaaaggcgtccagcacatcatgcagcatctgcacggtgtggcgccccagcgattccaggctcaccagcagcggctgatgctgctgggaaaatttttccagcgcggtacggcagattttatccgcgacgtcgccgatgcgttccagctcggcgatggttttgataatcgccatcaccagacgcaggtcgctggcggtcggctgacgcttggcgatgatgcgcacgcaggcctcatcgatcgccacttccatcatattgacctgcttgtcgccgtcaataacgcgctttgccagttcgctgtcctggttatgcatcgcggtgatcgcatcagaaagctgctgctccaccagcccacccatggtcatgacctgggtgcggatgtactccagttcagcattgaactggccggaaatatgtttgttaagatttaggttatccatagtatctcctgattgcccaataggttagagcctggtagcagaagggcaatcaaccgtagcggccagtaatataatcttcagtttgcttcttagcgggcttggtaaacagatcgtccgtgttgctgaattcaatcagctcgccaagatacataaatgccgtatggtcggagcaacgcgcggcctgctgcatgttgtgggtcacgataacgacggtgtaatcctgtttcagttcagtgatcagctcttcaatacgcccggtagagatcgggtccagcgccgagcagggctcatccagcagcagaacttccggacgaatagcgataccgcgcgcgatgcacagacgctgctgctggccaccggagagagaatatccgctctgatgcagtttatctttggtttcattccacaatgcggctttggtcaatgcccactgcacgcgctcatccatatccgtgcgggaaagcttctcaaacaggcgcacgccaaaggcgatgttgtcataaatcgacatcgggaacggcgtcggcttctggaacaccatccccactttggcgcgcagcagggcgatatcctgggtgttggtcagaatattatcgccatcgagcagaatttcgccttccgcacgctgctccgggtacagctcaaacattttgttgaacgtacgcagcagcgtggatttaccgcagcctgacggtccgataaacgccgtaacctggtttttggtaatatccaggttgatgtttttcagggcatggaattttccgtagtagaaattcaggttacgaactgaaagtttacccggggtcgcattcaccatactcatctcgttcttttcctcattcggcgccgcgtttcgccgcgccgcaaaaattaaccgtgtttattcttcgcgaaaacaacgcgcgccagaatgttcagcagcaatacgcacagggtgataatcaagaccccggcccatgccagttgctgccactccgcaaagggactcatggcaaatttgaaaatcgtcaccggcaggttagcaatcggctgcatcatatcggtgctccagaactggttggagagcgcggtaaacagcagcggcgccgtttccccggcgatacgggcgatggccagcagaataccggtcataatgcccgataccgatgctttcagggtgatcgcagagatcatgcgccacttcggcgtacccaacgcatatgccgcctcacgcaggctgtccggaaccagcttcagcatgttttcagtggtacgaataacgataggtacctgcagcagcgccagcgcaatcacgcccgcccagccggaaaagtgctgcatctgcgcaacgacgatggtgtaaacaaacagaccgacgacaatcgacggcgcggaaagcaggatatcgttaataaaacgaatcacttcggccagcaaggatttacggccatattccgccagataaatccccgccagaatccccagcggggtaccgataaccgtcgaccagaggatcagcaatccgctgcccgccagggcgtttgccagaccaccgcccgccgtatttggcggcggcgtcatttcagtaaacagcgccaggctcatgccgtcgatgccgcgggtgacggtggacatcaggatccagatcagccagaacagaccaaacgccatggtcgccatcgatagcgtcagggcgagacggtttttcatgcggcgttttgcctgcattttgcgacgggattccgccagctccgcggtggtttgtaattcaatcgtcgccattagcgagccccctcattcttagccaggcgcatgatcataaacttcgatgcggccagaacaataaaggtgataacgaacagaatcaggcccagctccatcaatgcggcaacgtgcagtccggtttccgcttcggcaaactcattcgccagcgcggaggtaatgctgttgcccggcatatataacgaagcgctatcaagctggtaggtgttgccgataataaaggtcaccgccatggtttcccccagcgcgcgccccagaccgagcattaccccgccaatcacgccgtttttggtgaaaggcagaacgatacgccagataacttcccacgttgtgcagccgataccgtaggcggactctttcatcatcaccggcgtctgttcaaagacgtcacgcataacggccgcgatgtaaggaatgatcatgatggccagaatcacgcccgccgccagaataccgataccaaatgccgggcccgcaaagagcgcgccaacgaacggaatggtcgacagaacgttgccaaccggctcctgaaaataggtcgcaaacagcggggcgaaaataaacaggccccacatgccgtaaacgatactggggatcgcggccagcagctcaatagcgatacccagcggacgcttcagccaggcgggtgacagttccgtcaggaacagcgcgataccgaagctcaccggtacggcgatcagcagcgcgataaatgaggtgaccagcgtcccgtaaatgggtaccagggcgccgaaaatctggttcggtgcatcccactctttggtccacagaaaggcaaagccaaatttctcaatgcttggccaggacgagatgataagggagacgatgatgccgccaagcatcaatagcacaatcagcgccgccagttttaccagcacgctgaaaattatgtcaccctttttccccggagggttaaatgccggcttggttgcagccataagttactcttcagtttcgggccagaaaaaatcgtagtttactgatctttctggcaaaggtaatgccataccctaaataattcgagctgcaggcaggcagctggcttgtggatccccgggaacatagatgggctatgtgaccggggtgaacaagcgctgccaacgcacctgtagctcgaaggctgacgggtattagtacagcgctttaccgctgctgtcctttacgttggtcttccatgccgcgcgaacttgctcaaccacgctttccggcagggtggcataatccagcgcgttggcttctttaccgccgtttttatacgcccagtcgaagaacttcagcacttcggcggtctgctctggcttgttggaagccttgtgaaccagaatgaacgtggttgaagtgatcggccatgcgttgtcgcctttctgattcgtcagatcctgtgcaaaggatttgctccagtcgatttctttcgccgcgttagcgaagttatcttcagtcgggctcaccggcttgccatcggcggacagcagtttggtgtaagcgaggttgttctgttttgcataggcatattctacgtagccgatagagcccggcagacgctgaacgaacgcggcgatgccgtcgttgcctttaccgcccagaccggtcggccagttaacggttgagcccgcgccgattttagatttccactcttcgttcaccttcgccagatagctggtgaaaacgaaggaagtaccggaaccatcggcacgacgaaccaccgcgatgttctgagaaggcagcttcatgcccgggttgagcttagcaatcgccgcgtcatcccattttttgattttgcccaggtagatatcacccagcgttttaccgtcaagcaccagctcaccggatttcacgccaggcaggttaattgccagcactacgccgccgataacggtcgggaactggaacagaccttcctgagccagcttgtcatcagcaagaggggcatcagaagcaccgaagtctacggtgttggccgtaatttgttttacgccgccagaggagccgataccctggtaattgactttattacccgtttccttgttataggtatctgcccatttggcatacaccggcgcggggaaagttgcacctgcgccagtcaggcttgctgctgcaaaaacagagaaagcgctcatcgataaggtcgcggcgacaactgttgcgacggtggtacgcataacgttcataatgtctcctgctggattcgtaaaccattgtttcgaagctatggtgagcaaaataggacaaacaggtgacagtaaaatgtacgaattattacagttttatgacaagcaaaaagacgggaatttacgttaaataaaaacaatacaaatcatattgttactatggttaatgatagaaagattagcggaaaattttatttttatgacagcgaaaaagcgtctcaaaaatgacaggctgtcataaagcgggtgggatctcgccgttcaccgcaaataaaaagggccgccggacggcagccctttcaacgctgtaaaatcgttattccacggtaacggatttcgccaggttacgcggctggtcaacgtcagtccctttgatcagcgcgacgtgatacgccagcagctgcagcggtacggtatagaaaattggcgcgatcgcctcttcaacatggggcatctcaatgatgtgcatattgtcgctgccggtgaaacccgcatcgccgtcagcaaaaacgtacagctggccgccgcgagcgcgaacctcttcaatgttggatttcaatttttccagcagttcgttgttcggcgcgaccaccaccaccggcatttcagcgtcaatcagcgccagcggaccatgcttcagctcgccggcagcataggcttccgcatgaatataggagatctctttcagcttcagcgccccttccagggcaatgggatactgatcgccgcggccaaggaacagcgcgtggtgtttgtcagagaagttctcagccagcgcctcaatacgcttgtcctgcgaaagcacctgctcaatgcggctcggcagcgcctgcaggccatgcacgatatcatgttcaatcgacgcatcctggcctttgagacgcgccagtttcgccaccagcatcagcagaacggtcagctgcgtcgtgaaggctttagtcgaggcgacgccaatttccgtcccggcgttggtcatcatcgccagatcggactcacgcaccagggatgatccaggcacgttacaaatcgccagcgaccccagatagcccagctctttcgacaggcgcaggccggcgagggtgtccgccgtctcgccggactgagagagggtgatcatcaggctgttgcgacgtacggccgatttgcgatagcggaactcggaggcgatttcaacatcgcacggcacccctgccagcgactcaaaccagtagcgggacaccatacctgagttgtaggaggtgccgcaggcgatgatctgaatatgctcgaccttagacagcagctcgttagcctgcgggcccagctcgcttaaatcaacctcgccgtggctaatgcgcccggagagggtatttttgatggcgttcggctgctcgtagatctctttctgcatatagtgacgatagatacctttatcgcccgcgtcgtactgcagactggattcaatatccgggcgctgcacttcggcgccggatttatcaaagagagtcacggaacggcgggtgacttccgcaatatcgccctcttcgaggaagataaagcggcgggtaaccggcagcagcgccagctgatcggaggcaatgaagttttcccccatccccaggccaatcaccagcgggcttcctgaacgagcggccagcagcgtacccggatcgcgggaatccatgatcacggtaccgtaagcgccgcgcagctgcgggatagtccgcagaaccgcatcacgcagagtaccgccctgttccagctcccagtgaaccaggtgcgcaataacctccgtgtcagtctcggaggcgaaaacgtagcccctcgactgcaacagctcgcgcagcggctcatggttttcgatgatcccgttatgcaccaccacaatatggtcagaaacatgcggatgcgcgttaccttcagacggttcgccgtgcgtcgcccagcgggtatgggcaatcccggtaccgccgtgcaacggatgttcttccagcgcctgggccagcatctgtactttcccgagacggcgaacgcggttcatatgaccttcgttatcgacgacggccagaccggcggagtcataaccgcggtattccagacgacgtaaaccttcgagaaggatttcagcaatatcacgctgcgcgactgcgccaacaattccacacatagtttttaattccgattttggctgtatgccatacgttgtcggtcaacctgtttacccgtattttcgggcgccccgagccttgtagagagtggggttatttttatgggtactgccgtggggggaggattattttatcccctcaccccgctctttcccccgaaaagggcgaaagagaaatagcgttactttttcttcaccgggcgctgccagccctgtttatgaacctgcggcacgcggcttaacactaattcattatcggcaacgttacgcgttaccgttgttcctgcggcaatggtgacccccttgccgacggtcaccggagcgaccagctggctgtctgagccaacaaacacgtcatcgccgatcactgttttatgcttatttgcgccatcatagttacaggtgatggtgcccgcgccgatattcacgttatcacctatctcggcgtctccgagataggagagatgcccggccttcgtgcctttacccagacgcgcctttttaatttcgacaaagttgccgacgtgcgcgccttcgagaagctccgcgccagggcgcaaccgtgcgaacggcccaatggtacaggcggcctcaagatgagcatcctctaccacggtataggggctgatctcgcaatcatcaccaatggtgctgttcttgatgacgcagccggtgccaatctttacccgatcccccagtaccacgtcaccttcgaagataacgttagtatcaatttcgacatcgcgcccgtgtttcagcacgccgcgcagatcaaaacgcgccggatcgcgcagcataacgcccgcgagcagcagttcttcagccttttcagactgccagacgcgctcaagacgagagagctgcaggcggttattcacgccttccacttcgcttagacgctgaggatgaacagcggcaatttcacgaccttcttcataggccatggcgataatatcggtgatgtagtattcaccctgaacgttgttgttggtgagcttagccagccagcgtttaagatccgcgccattggcgaccagaatcccggtattaatttcctgaatccggcgctgctcgtcgctggcgtctttatgctcgacaatgcccgtcaccgctccgttatcgcgcgtaatgcggccgtagccggtcggatcgtcaagcttcaccgtcaacagaccgatgccgccctgcggtttcgcttcccgcagacgcttcaatgtttcgacggaaatgagcggcacgtcgccgtacagcatcaggatatcttcatcatcgctgaagaagggcgccgcctgctgcatggcgtggccggtacctagctgttcggcctgcaggacccagttgaggttgtcttcgtgcagcgtctggcgaagcagatcgccgccgtgtccatacaccagatgtacggcggaagcgcctaattctttagctgcatcaataacatgctgcaccattggcttcccggccagcgaatgcaacaccttaggaagatcggaatacatgcgggtacctttgccagcggcaagaataaccacgctcatcggactgtttgacatacgcatcctgactgctgttggaacgaaaagtaaaagcctttcacgttgaaatatctacatatttttcatcatgaaacgagacgaagataaaacgcacaagcgtaacgctatacaccattttaggtgggtatttttagtcagcgcaaacccgtttagcgcaaaaaaagcattttaatgagtggcaatgccggctatccctctgcttttgctgtttttttggcgggtaaataaagaaaagtcataaaataaaacacagttttaatattcattaattgtgacgtgataaatagaaacgccatttcattttcctgataatgccggttaataattacccaggagaaaagaatgaataacaaaatacctttggcattaaccctttgcagtacgatgatcgcgctaccgctgcaggccaacgaaggtcatcagtggcgggcaatcgcctttgggcaatctaccgacagcaatttttcctcgaatgttctgccggaaaaaattggcgtcaacgatgtcaccatcgccggaaaaaaactgacgccgcaggacgtcgccgacctcagccagcccattaccatcgagagccggggaggtaaaatagccaattctcacgacggactgaccttcttttacacccggctaccgaccagccagaattttatcctgcaggctacggtgaccgtcaatcagtttggcccggaaaatggcgcgcgtcctgcggcacaggaaggagcaggactactggtgcgcgatgtaataggagttccgcgtcaacagccgctgaaggtcggttacgaagagtttccggcggcatccaatatggtgatgaacgccattatgacgcaggataaaaaagatggctcacatatcaaattgcaggctatcagccgggaagggataacccaaccgtggggcaatgcgggcgcatcaataaagcgtcagagctataaagagaaaatcgatatccagcaaacgccgacgttccagctcagactggaacgcaccaacgacgggtttattacctcatgggcagcaacgggcagcgaggaatgggtgagccagcaggttccgcacgccgatctggttgcccggcaggataaagaacattactacgtcggcttcttcgcctcacgtaatgcaaaaatcaccgtcagcaacgcctcgctcaccacctcagcggcacatacggttccctccgcgccgtatgtcgctaaaggctggccgccggttatgcaaattgcttcgggaacagtaagccagagcaaagcttacatcctacaggcgcgcaccaacagcgatgggcgcatcaccgttcgtcaggatgaagtggtgatcgggcaggataaaaccgtgaaggccggggaaatgtttacccagcctgccgtactgaaagataaaagcacgttcgaaatccgcttcaccccggccaccggcgctgaaacgctgacccagacgctgacggttgaacagagtccccatgtgacaggcaatacgctctacgccgcgccagagggacaacctcaggcaaaagggacggcggactcgccgctggatttcgcctccgctatcaaactcgtcccgcccggcgggcaaattgtattagccgccggagattacccgcaaacgaccattcctgtcagcgccagcggcctgaaggacaaaatcaaaacgctaaaagccgacggaaaagcggtgattcacgggctgctgctggatgccagctactggcatatcgatgggattgagattacggacaagagcctgcgcgtacagggcagccataacctgatcgagaacgtcaccgcgtatcgtaacgatgataccggcattcaaatttcctctccggcggatgttggacgcccgctgtgggccagctttaaccgggtagtgaattctgaatcctttagtaacgaggatccgggcaaaattaacgccgacggcttcgcggtgaaaatgcgcgtaggagagggtaaccggctggagggctgttactcgcacgataatatcgacgacggtttcgacctgtttaataaaattgaggacggtgcaaacggcgttgtggcgatcgagaactctattgcccgcaataataccagtaacgggtttaagctcggtggggaagggcagccggtcgcccacgaggtacgtaacagcatcgccatcgataaccatctggacggttttaccgacaactttaaccccggcaagctggtggtggttaacaacgtcgcggtagataaccagcgctttaactacctgttccgcccgagtccgtacggtgcgccggaaacgcagggcaccttcagcgagaacctttccctgcgcagccagcctgggaaatatgacgatgccgttgtcgggaatgttgacgatagcaactattttatccacggcggcagaagcatcaacgctcagggcaagcgcattaacagcgccgattatcagacgctggcgctgccggacccactgacgcgtgaggccgacggcagcttcaacaccggtaacttcctcagccgcaactaacccgctatacgtgaaaaacataaaggtcgccctggggcgaccttttcactttctgtctgtttcacaccgcatgtgttgtcgttttagttagcggtacagcgcaaaaacagtctggaaagttgacttcttagtggttgaacgtaccgaaggttacgttcatagcactgaagaaagcgacgattttattaagcagtttcatgatctcttcctggatagcgattacgtttttgatgaatttttttgtgactcacatcacaaaaacaagtctacgcttcatcttttaaacgatcaacaaaaatgagacacgcatcacaaatttttaaacccgctttttagttttgctttttctgaaacgaagccataaaaaaagccagcctggaaaccagactggcttttagcgttcaagccggtgttacatcgcttttttggtcaactcgataacgcgcagtttagcgatcgctttggccagttccgcagacgcctgagcgtagtccacgtcaccatgagagctcttaatgtgctcttcagccttacgtttcgcttccagggctcgcgcttcgtcgagatcctggccacgaattgccgtatcagccagaacggtcgtgctacccggctgcacttcaagaatgccgcctgacaggtagataaattcttcgtgaccgtgctgcttaacgatgcgaatcataccaggcttaatggcggtgagcagcggcgcgtgccccgggtaaatacccagttcaccttcgctacccgttacctggattttctcgaccagaccagagaacatttgtttctctgcgctgacgacgtccaggtggtaagtcattgccatatcaccctccgattaaggcgttaaagttttttggctttttccacggcttcgtcgatagaaccgaccatgtagaacgcctgctccggcaggtgatcgtattcgccttccatgatgcctttaaagccacggatggtgtctttcagggagacgtatttgcccggagaaccggtaaatacttctgccacgaagaacggctgggacaggaagcgctgaatcttacgcgcgcgagctaccaccagtttatcttcttcagacagttcatccatacccaggatggcgatgatgtctttcagttcctgataacgctgcaggatggactgaacgccacgagcggtgtcgtagtgctcctgaccaacaaccagcggatccagctgacggctggtggagtccagcgggtcaactgccggatagatacccagagaagcgatctgacggctcagtaccacggttgcgtcaaggtgcgcaaaggtggtggctggagacgggtcagtcaagtcatccgcgggtacgtataccgcctgtacggaagtgatagagccggttttggtggaggtgatacgttcctgcagaacgcccatctcttccgccagagtcggctggtaacctaccgctgaaggcatacggcccagcagtgcggatacttcagtaccggccagggtgtaacgatagatgttatcgacgaacagcagaacgtcacgaccttcgtcacggaacttctcagccatggtcaggccggtcagcgcaacgcgcagacggtttcccggcggctcgttcatctggccatacaccagggatactttatcgataacgttggagtcggtcatttcgtggtagaagtcgttaccctcacgagtacgttcacctacgcccgcaaacacggagtaaccggagtgctcgatcgcgatgttacggatcagctccatcatgtttacggttttacctacacccgcaccaccgaacagaccaactttaccgcccttcgcaaacggacacatcaggtcgataactttgatgccggtttccagcagttcctgagagtttgacaactcttcgtaggaaggtgctgcgcggtggatagcccaacgctcttcttcaccgatgtcgcctttcatgtctaccggttggcccagtacgttcatgatacgacccagcgttgctttacctaccgggacttcgatcggatgctcgaggtcttttacttccagaccgcgacgcagaccgtcggaagaacccatggcgatggtacgaacaataccgccgccgagctgctgctgaacttccagcaccagattctcactaccattttgtacctcaagagcctcgtacacgcgcggtacggcatcctgagggaattcgacgtcgaccacggcgccgattacctggacaatttttccagtagccatcttgaatcctctacgaattaacctggttataccgcggatgctccaccgacgatctcggtgagttcctgagtaatgctggcctgacgagctttgttgtataccaactgcagctctttaatcaggctgccgccattgtcggtcgcggctttcatcgccaccatacgtgcggcctgctcgctggccaggttttctaccacgccctgataaacctgagattccacataacggcgcagcagggtatccagcagcgctttcggatcgggttcatacaggtaatcccaggatttacgcttcaactcaccatcttctgaagccggtaacggcagcagctgagtgatggttggaacctgagacatggtgttaataaatttgttgctgacaatatacagcttgtccagacggccttcatcgtaggcctgcaacatcacttttaccggaccaatcagttcggacagggatgggttatcccccatacccgtcacctgggcgacgacattaccgctaacggaattaaagaacgacacgcccttggagccgatcattgcgagttcgcactgaacgcctttatcggaccatgctttcatttccgccagcagctttttgaacaggttaatgttcaagccaccgcacagaccacggtcggtagacaccaccaggtagcccacgcgtttaacgtcgcgttcttccaggtaagggtgcttatattccagattaccgttcgcaaggtgaccgatcactttgcgcatcgtatctgcataaggacggctggccgccatacgctcctgcgatttacgcattttggaagcggcgaccatttccatcgctttagtgatcttttgcgtgttctggacgcttgcgatcttactacgtatctcttttgcgccggccatgagcttctcctcaatgccttgcggcctgccctagagcaagccgccagactttaccaggattgggttgctttgaaggaatcgaggatgcctttcagcttgccttcgatttcgtcgttatagccaccggactggttgatctcttgcatcaacggagcgtgatcacggtcgacgtaagccagcagagcggcttcaaagctaccgattttcgacagctcgacatccgccagataaccacgttctgccgcgaacagaaccagagactgctgcgcaacggacatcggcgcatactgtttctgtttcagcagttcggtcactttctgaccgtggtccagctgcttacgggttgcatcatcaaggtcagaggcaaactgggagaacgccgccagttcgcgatactgtgccagagcggtacgaataccaccggacagtttcttcatgatcttggtctgagctgcaccaccaacacgggatacggagatacccgggttaaccgcaggacgaataccggagttaaacaggttggtttccaggaagatctgaccatcggtaatggaaattacgttggtcggaacgaacgcagaaacgtcacccgcctgggtttcgataatcggcagcgcagtcagagaaccggttttacccttcacttcacctttggtgaaagcttcaacgtattcgacgttaacacgtgcagcacgctccagcagacgagagtggaggtagaatacgtcgcccgggaatgcttcacgtccaggcggacggcggagcagcagggagatctgacgataagcaacggcctgtttagacaggtcatcataaatgatcagcgcatcttcaccgcggtcgcggaagtattcacccattgcacaaccggcgtacggcgccaggtattgcagtgcggcagattcagatgcggttgcaaccacaacgatggtgttagccagcgcgccgtgttcttccagtttacgtaccacgttagaaatcgtggacgctttctggccgatggctacgtagacgcacttgatgccggaatcacgttggttgatgatggcgtcaatagccagcgcggttttaccggtctgacggtcgccgatgatcagttcacgctgtccacgaccgattgggatcatggcatcaacggatttataaccggtctgcaccggctgatcgacggactgacgttcgattacgcccggcgcgatagcttcaacggcggagaagccgtcgtgctccagcggacctttaccatcaatcggtgcacccagggtgttaaccacacgtcccagcaggccgcggccaaccggaacttcaaggatacggccagtacatttaaccttcataccttcggcgaggtcagcgtacggacccatcacaactgcacctacggagtcgcgctccaggttcagtgcgatagcgtaacggttacccggcagagcgatcatctcaccctgcatacaatcggccaggccgtgaatgcggataacaccgtcacttacagaaacgatagtaccttcgttatgagcctcgctcacaacattgaactgagcaatgcgctgcttgatcagttcgctgatttcggtggaattcagttgcatgctccagtccccttaagactgcaagacgtctgcaaggcgttcaagacggccgcgtacgctaccatcaatgaccatatcacccgaacggatgattacgcctgccattacagacttatcgattttgcaattcagcttaactttgcgtgacagacgtttttccatcgcggcggtaattttcgcaagctgttcgtcactcatttgagcggcagaaataacttctacctctgcggttgcctcactggcagcgcgcaggtgaatgaactgctcgagaacatcagggagcgctttcagacgaccattttcagccatcacccggatcaggttttgaccattttcgtccagttgctcaccacaaaccgcgataaacacatcagagagcgtttccggcgccagtgcgccagagagtagctctgccatttcttcgtttttagtcacttcagcaacaaacgccagcatatcctgccagcgttcaacgctgttgtgttcgacggcaaagtcaaaagctgctttggcgtaggggcgagctaccgttacaaattcagacatcagcccctccctccttacagttcagcgacaagtttatccacgatgtcgctgttagcagcttcatccacggaacgttcgatgatcttctcggcgccagcaacagccaggatagcaacctgcttacgcagctcctcacgggcacgtttacgttcggcatcgatttcagcctgcgcctgtgcgacgattttggtgcgttcctgttctgcttccgcttttgcttcatccaggatctgagagcgacgcttgttcgcctgctcgatgattacctgggcttccgctttcgctttttcagctggtcggtcgcgttggcctgtgcaaggtccaaatctttcttagcgcgttctgcagaagctaaaccgtcagaaatttctttctggcgcttttcgatggcagccattaaaggcggccatacatacttcatgcagaaccatacgaagataacaaacgcgatggcctggccgaggattgttgcgttcatgttcacagcacaatacctcttaaaaaataactctgtggcttaggtttctttcgaacaacttactacgcgacggcgaacatcacgtacagacccagacctacagcgatcatcgggatagcatccaccagacccataacgataaagaactgagtacgcagcagaggaatcagatccggttgacgcgctgcgccttccaggaatttacccccgaggatgccgataccgatcgcagcaccgattgccgccagacccatcatcacagcggcagccatgtacagcagatccatattcaggttttccatgacagtctccagtttgtttcagttaaaacgtagtatgttggtaaaaatcaatgctcttcagatgccatcgacagatagacgatcgtcagaaccatgaagatgaaggcttgcagcgtaataatcaggatgtggaaaatggcccatggcacattcagaatccactgtgaccaccacggcaacaggccagcaatcagaatgaaaatcagctcaccggcatacatgttgccgaacagtcgcagacccagtgatacaggttttgacagcaggcttaccccttcaaggattaagttgacaggaatgaacgcccagtgattgaacggctgcagggtcagttctttaacgaacccgcccacgcctttcattttgatgctgtagaaaagaatcaggataaatacgccaagcgccatcgacagagtgatgttaacgtcagctgacggcaccacgcgcagagcaggcagaccgagaacgtgttcgccgatccaagggataaagtcgataggcagcagatccatcaggttcatcaggaatacccagacgaacacggtgagggccagcggagcaatgaccttgctcttgccgtgatacatatctttgacgctgccatggacgaagccgatgatcatctcaatgaaggtctggaatttaccaggtacgccggttgtcgcctttttagccacgctgcggaacataaacaggaataacagaccgagcaccactgagaaaaacatggagtcaatgttgagcgtccagaaggtggccggggggttgtgcggatccaccagcgagaatgtacgcaggtccagctgaaggttgttcagatggtggcctatgtaatcctgcggcgtcatattttctgaagccatgatgccttttaccctttgttgttaattacagctggcgccagaacttgtaccaccagcaccaaaacccacgtcactatcagcggcaaaaataccactttcaaaaccgccagcgccaccgccagaaaggcgaaggtcagcaacaccttgaaggcttcaccaatggcgaaggaccaggccactcggcctttagctggtgtatgcgcctgatgacgccaggcaaaaatcataaatatcatgtttggcaaaagaaccgccaaacctccactcaccgcggagatgccccagaaagggtctttgaggctgaacagcagtccacttgctattactgccagtaactgaataaacagaagcttacgagcaacgtttcgactcaagagcgacactgacatcacgtttttactcctgctcccttcgaggtatgtcgcgtgtcgtataaaacgtcctttaagacgaagagtcaagcatcaaaaagcggacaaattatacggtgacgcctcgtgatttcaaacaataagtagcaaaatagtgaataaatgtttaattattttccgacagacaacttttcatgcatttcaccgatctgtgagccgtcatgcaaaactgcaaataccgcgaaaaatcggcaattaaagcgtgcatcagatcacataataaacatttttcgcgaaatcgaattaattctgtacataaaactcaattttttatccgtttgatattcaacataaaaaccaggtattctttctaaaacaatcccatatacaataaaaaccttttattgacattcataataaaaatttaacatcagtatgaagtgcaagcagcgagatttttagcgtactgatattttcaatgttgactattctgttggtaaagcaacagggccaagttaacggaaagaaaacccctggtaaccccagggttaaagacagtccgataataccctgccgtgacttttatttttgtaacatccacggaccgtgtttttttcacattttttgataaaaattaaatcatttttggctgaatcaccacaaggtgacgctccccttccagctgaggcacatgcagttcgacaacttccttaatgacgaccccttccggcagatttgccatttcatcttcctgcgctaagcccttgagcgcataaaagtgaccgttctctgcaggtaaatgatggcaccagctcaccatgtcattcagcgacgcaaatgcgcggctaatcacgccgtcaaacggcggctctgccgggaactcttccacacggctttgtaccggggtgacgttatccagtttgagctcatgctggacttgccgaaggaaacgtactcgcttgcccagactgtccagcagggtgaagtgggattcaggacgcacgatagccagcgggatccccggcagcccaggccccgtaccgacatcgataaaacgcgttcctttaaggtatggcgcaacaacaatgctgtcgaggatgtggcgtaccagcatctcgtcaggatcgcgaaccgaggtcaggttataggccttattccacttatccagcatgccaacgtaggcgacaagctggtttttctggtgatcggtaagtgaaatacctgcttcatcaagcagacgagaaagtttgttgagcacgatcgttacctgtttaaaaacaatgagcccggaggcgatacgcttaccgggctgagaaattgacctgacggatatctgatgcgctattcgcccatgtatcgttcagtggaatatcaggcgctacggcgcagcattccctgcttttttaaccacaccagcaaaatcgagattgccgcaggcgtaatgccggaaatacgcgatgcctgccctatcgaagacggcttatggtcgttcaacttggcaatgacctcgttcgacagcccattcacctggcgataatcaagcgtagcaggcagcaacgtgttctcgttgcgctgttgtttctcgatttcatcctgctggcgcgcgatgtagccttcgtattttacctgaatttcgacctgttcagccgcttgcttgtcctcaagacccggcgagaacggcgtcatctgcaccagctgttcgtaggtcatttccggacgacggagcaaatcttcaccgttagcttcacgggacaaaggcgccgtcagtcgagcattcacttccgcagcgctttccgccagcggattaacccagctggttttcagacgctgacgttcacgttcaatgctctcaagcttctcgttgaaacgcgcccagcgttcgtcatccaccagacccagttcacgaccttgttcggtcaggcgcagatcggcgttgtcttcacgcagcatcaggcggtattccgcacgagaggtaaacatgcggtacggttctttggtaccgagagtacacagatcgtccaccaggacgccaaggtaagcctgagagcggccaggcgcccacccctctttctcggcggagaaacgagcggcgttcaggcctgccagcaggccctgagcggcggcttcttcataaccggtggtgccgttaatctggccggcaaagaacagaccatgaataaatttgctttccagcgtcggtttcaggtcgcgcgggtcaaagaaatcgtactcaatagcgtagccagggcgaacgatttttgcattttccatcccctgcattgagcggacgatttgcatctggacatcgaacggcaggctggtggagatgccatttggataaatttcgttggacgtcaggccttccggttcaaggaaaatttgatgctggttacgatcggcaaagcgcatgaccttgtcttcgatcgaaggacagtagcggggaccgatcccttcaatcacgccggcatacatcgggctgcgatcgaggttattacggatcacgtcatgcgttttctcgttggtatgcgtgacgtagcacggcacctgacgcggatgctgcgaagcatctcccataaacgagaagaccggcatcggattatcgccgtgctgctgtgccagaacgctgaaatcaatcgtcctcgcgtcgatacgcggcggggtaccggttttcaggcggctgacgcgcagcggcagttcacgcaagcggcgggacagcgggatcgacggaggatcgcctgcacgaccgccgctgtagttatccagaccgatatggatcttaccgtcgagaaaggttccgacggtcagtaccaccgctttggcgcggaatttaagccccatctgggtgacggcgccaacaacacgatcgttttcgacaatcagatcttccaccgcctgctggaagatcattaaattaggctggttttccagcgcggtacgtacggcctgccggtacagcacacggtcagcctgagcgcgagtcgcccgtacggcagggcctttgctggcgtttagtatcctaaactggatgccggcgtggtcaattgccttcgccatcaggccgccaagcgcatccacttcttttaccaggtgtcctttcccaatgccgccaatcgccgggttgcagctcatctgccccagcgtgtcgatattgtgtgtcaaaagcagagtctgttgacccattcgcgctgcggccatcgcggcctcagtgcctgcatgacccccgccaatgatgatgacgtcaaaaggatcctgataaaacatggtggtatgcctcgcataaagcggtttgaaaatagagtgaagcccgggccgtggattctactcaactttagcctttcgagaaagcgccgggatcctgagtattaaaaagaagatcttttatttagagatctgttttattgtgatctcttattaggatcggcttgtcttgtggataagtcagatccgcgatttaagatcaaacgcttaagaaggatcgctttctgtgaatgatcggtgatcctggtccgtataagctgggatcaaaatgaagggttatacacagcacaaaaatcagtcaagggttatactttggataactaccggttgatccaagcttttaagcatagttatccacagaagaaagtatgatctttacaattctcagagcaagtttttccaggatcccagccaaatctcggccggatcttccggaatttcatgttcgagaacgttaatttttagcgtttcaccgatctgttttgccccgcaggcgttgagcgccgtctcgagcttatcaattgctccgcagaaggtatcgtattcacggctaccgatgccgactgcgccaaaacggaccgcagagaggtcgacctgcttctcctgaagcgcttcatagaaaggcagaagattatcgggaatgtccccggcgccatgcgtcgaagagataaccagccagatcccttccgcctgcagatcgtcgatcagcgggccgtgctgaatagtcgtgctgtgcccagcctcttccagcttttccgccagatgttctgatacatattctgcgctacccagcgtactaccgctgataagagttatctctgccatgatcgcccgctccactattcagagtggcgtattgtacgctgtgagcgagctgggatctacctgtggaaaaatgtgggattaaaaagctcgatcacgggcggatggtacgcataatcgggttttgcaggacgatcagcgtttcagtggactgaatttcatcaattgtttggatcttgttgataagtacatgctggagcgcatcaatcgatcggcacatcacctttataaagatgctgtagtgtccggtggtgtaataggcttcagtaacctcatccaggctgtttagcctggccagcgcggaggggtagtctttcgcgctcttcagaatgatgccgataaaacatcccacatcgtaacccagctgcttggggctgacgtcgatgcgtgcgccggtaataattccggcctgcttcattttctctacccgcacgtgaatggtccccgggctgacgccaaactgttttgccagttcagcataggcggtgcgcgcgttggccattaaggcctcaagaatgccgcggtccagattgtcgatctgataattttccataggtttttcttatgaagtttgacgaatatttctattttagcctcaaattttaatgaatcaaaatcgatgcaggctttttgttgttggattattgaattgcagcgctgttttgttgcttaatcaatggcaacaggacgcaggagttataaaaaatgaaaaccgcatacatcgcaaaacaacgccagattagtttcgttaagtcacatttttcccgccagcttgaagagaagctcggcctgatcgaagtccaggcgccgatcttaagccgcgtgggcgatgggacccaggataacctctctggttgcgaaaaagcggttcaggttaaagtgaaaacactgccagacgcccagttcgaagtggttcattcactggcgaagtggaagcgtcaaaccttgggacaacacgacttcaacgcgggcgaagggctgtacacgcacatgaaggcccttcgccccgatgaagaccgattaactcccatccattccgtttacgttgaccagtgggactgggagcgcgtaatgggtgatggagagcgccactgcggcacgctgaaagcaaccgttgaagcgatctatgccgggatcaaagcgaccgaagacgccgtcagtaaagaatttggcctcacgcctttcttgccggagacgatccagtttgttcacagccaggagcttttaagccgctatccggatcttgatgccaagggccgcgagcgggcgatcgcgaaagagctgggcgcggtattcctgatcggtatcggcggcaagctttccgatggccagcgtcacgacgttcgcgcgccggattacgatgactggagcacgcctgccgctgaaggctatgccggtctgaacggtgatattctggtgtggaacccggtgcttgaagatgcattcgagctctcttcaatggggatccgcgtggatgccgacgcgctgaagcgtcagctcgcgatgaccggcgacgaagatcgcctgcagctggaatggcaccaggcgctgctgcgcggagagatgccgcagacgattggcggcggcattggccagtctcgcctgacgatgctgctgctgcagcttgagcatatcggccaggtgcagtgcggcgtgtggccaacccaggttcgtcaaagcgttgctgcgcttctttaatcagtgattaacgccgccagcgtctcagcaggcggctacgcaacccggtatcaaagcgccagatatgatcgaatacgcgcataatgccgggcttgccgtgtaccgacatcgccaccgcatgaaaacgatgttgatgtttatgctgtagctctcccaccttattgatcacctcatccggcaagcgctgggcgataaaatcagaaatcaccaccgcatccgcatcgacccactgcggattctgcatacgctcaatcaccgcccggaagcagctggccagatcggtgccgccgcgaaagcgctggctcaagaaacgaatcgcctgttccagcccctgcgggccggtgagttcgtagtgcaccacttcgctggaaaacagcataatgaagcagcggcggttatccgccagagcgacccgcatcagcgccagacaaaacgccttggcgcactgttcattgaaaccgcccattgagccggaagtatcgacgcagacgataaacggcccgcgcggctgttcatcaacgtcctggcgcgttaccggccgttcggtgatcttttccttccacgcatcgccgtgtagtcgataggtcagcagctgcttttcaaccagcttgcggtagaactcaaactccagctcggtgatgccgagggtagccagctcaggcggcagcagacgtagaatatcgtcgctctgctgaagaccgtcgacctgctccggtacggtagccggttcgcgcaccaggctgcggaaggtctccatcggcgcatcttttttcggcaccgctttcgcttcacgcgagcgccccagctgttcggcgagctgcatgagttcaggttgttggcttaaaaagtccccgtagcgaacgatcagctggtaatcgcctcgcttcagctctccggcgctcatgtcccacaggtgtcccgccgcattatcattttccaccagcacgggctcgagctggccgctgagggtcatgcgctcctgaacttcgctcagcagctgatcgcgctcttcatccagcagctgctgattaagagaggttgcctgcaccaccaggctcagacgccagcgctgaaggaataacgtgtgcagcgccggcgtaaaggtgctgttgttgtccaccagctgctgcgcctggctggcaaaaggggagtgcagcttatgcagctggctcagaatttgcggcagctggacgataaactgcgaggtggaaagccgctgtgattgctgatagcactgaacttccgcatccagctcgggcgggacgttggtctcttttagtcgcgatctgaccgcttcccgccagcgaggaatgtcggcggcgataatatttttgagccgcggaaatttttcaaagaataccgcgagttgaggcgctgccagcagggccagcagcatctcatcgatcatgccctcttcgccgactgccagcatgacattcagtatgtccagcgtcatgactggcgggcctgtttaatctgcgttcccacgtcctgcaggctggcttcaatgcgccccagccactcgccgggaataaacagacatttctgctgttcgctgaagcggttatgttgctgatgccattcgtcgtccagcgcctccagctgttgcctgatttctgccggcatattttcccgtgattcgctaccgggcagggagagtcgcgacccctgcaggctcacatcgcgcacgaccagatgctggctggtatcgacatccatattcagctgctgggcaaaaccaatgccgttgagcttgccgcggatctcaccccctttctccagccagtgagcaagctcttcacgaacaaacgtaatatgaatcacttccaggtcgtgcagttttagcggctgctggagaagcagcgttagcgtggggtcctgcacttcagcaggcagttcataatgaggtttacggctgaacatcccgccgagacgggtgacttttagcgcggtcttatcgctttgctgctgttgaagctgaatgcgccgttgaataatcgacccgaggcgggtgagcatcgcctgctgctgccaggcgtggctggtcattaaggtctcaatctgcacggacatcagattcatcgtctcaatattgtgccacaggcaatccttcagcaggatcaggtctattggcgcaatggtgtcgcggccgctgaaaaaggcgctggcctgcagcagacgaatggcttttttccagcgacgatctgagacgtaaggcgcgtttggcaacgtatccagctgctggcgcagctggaaaatcagttcaaatacgctgtccggtagcttcacgctgccgatatcctgctgccattgcagaaattcctcgtcgctgacctgcaaactcgccgggacaggattactgttctcgtcctgctggcttatcagcattgagcggaagttcgttttatcctgtaccttatccagccataggcgaataagcatacgatcgtataaggcttccagactgttgtctgcctccgggagctcgttcgacgccgccaccagcaggcgcatggggatcttctcttcggtcgccccgttgcggaaatggcgttcgtttatcgccgtcagcagcgtattgagaatcgccgggcccgctttccagatctcatcgagaaaaacaatttcagcttccggaagatagccggcggtcaaacgttcgtagcgcccttcatctttcagcgcctgaatggagagtgggccaaagacctcttccggcgtggagaaacgagtcatcaggtattcaaatgcgcgagcctgctggaaggcgaacttgaggcgacgggcaatcaggcttttggcgatccccggcgggcccagcagaaaaacgctctcgccgctgagggcggcaagcaggcaaaggcgtattgcgtggctgcgttcgaagagtcctttttccagcgcggcgctgagccgggaaattctttctgccagtaaatgtgattgagccataatagagttgcgtgctttttagaatgtcgttgttaggtcgagtatagatgtttgattaggggtggtaatagcctgaagaatcgatttattttctttgagtcaggttaagatgatgtcagttaggggtacgattcagcaaataatcgtgcatactgtgcgctttttgtgggccaagggactaggcacacatttgttttataaacgaaaagactagtctatgagcactgataataagcaatcgctgccggcaataacgctggcggcaatcggcgtggtatacggcgatatcggcaccagtccactgtatacacttcgtgaatgtctgtcaggtcagtttggctttggcgttgagcgtgatgctgtttttggcttcctgtcgctcattttttggctattaattcttaccgtttcactcaaatacatcaccttcgtgatgcgggcagataacgccggtgaaggcgggatcctgacgttaatgtcgctggcggggcgaaacacctccgcgcgcgccacgtccatcctggtgatccttgggcttatcggcggcagcttcttttatggcgaggtggtcattacccctgccatctcggtgatgtcggcgatagaaggtctggaaattatcgctccggacctggatacctgggttgtgcccatatccatcattgtcctgacgctgctatttgccattcaaaagcacggtaccagcatggtgggtaagctgttcgcgccgattatgctgatctggttcctgctgctggcggtactgggcgcgcgcagtattttcgctaaccctgaagtgctgcaggcgttgaacccttactgggcggttcatttcttcctcgaatataaaaccgtctcgtttgtggcgctgggggcggtggtgctgtcgattaccggcgtggaagcgctgtatgccgacatggggcatttcggcaaattgccgattcgcctggcctggttttcggtcgtgctgccttcgctggtactgaactactttggtcagggggcgctgctgcttaaacatccggaagcgattaaaaacccgttctttctgctggcgccggagtgggcgctgatcccaatgctgatcattgccgccctggcgacggttatcgcttcccaggcggttatctccggcgtcttctctctgactcgccaggccgtgcgtctggggtacctgtcgccgatgcgtattattcacacctcggaaatggagtccgggcagatttacatcccgtttatcaactggctgctctatatctcggtggtcatcgttattgttaattttgagcactcctcgaatctggcggcggcatacggtattgcggtgacgggaacgatggtgctgaccaccattctgttcacgacggtggcgcggcaaaactggcactggaataagtttattgtggcgctgctgctggttgcctttatgtgcattgatatcccgctcttctccgcgaacctcgataaaatcgtctccggcggctggctgcctctgaccctcggtctggtgatgtttaccatcatgaccacctggaaaagcgagcgtttccgccttctgcgtcggatgcatgagcacggtaattctctggaggcgatgatctcttctcttgaaaaatcgccgccggttcgcgtgccgggtaccgctgtttatatgtcccgtgcgctgaacgtgattcctttcgcgctgttgcacaacctgaagcataacaaggtgctgcacgagcgggttattttgctcacgctgcgtaccgaagacgcgccgtacgtacataacgttcgtcgcgtgcagattgaacagatatcgccgtcgttctggcgcgtcgttgccagctacggctggcgcgaaacgccgaacgtcgaagaggttttccaccgctgcgggctggaaggcctgagctgccggatgatggagacctccttctttatgtcgcatgagtcgttgatcatcggcaagcggccgtggtatctgcgcctgcgcggcaagctgtatctgctgctgcagcgcaacgccctgcgggcgccggaccagttcgaaatcccgcctaaccgggttattgagctcggcacccaggttgagatctgattcgctaaggcccttcttgatgaagggcttttttgttttatctgctcgcttcagacttatctcgctgctgcgttgcgaaacgtttcgatgatgatcacaattctcacatctggtgatggttttctgttctcttattgctaatacttataccagcgaaacgtttcgctaatggagcaaaagagaaaatgaaaaaaggtaccgtcctcaatgctgatatctcgtcggtcatctcccgtctggggcataccgatacgctggttgtttgcgacgctggtttaccggttccccgcagcagcacgcgtattgatatggcgttaacccacggggttccctcctttatgcaggttctggaggtggtgacgagcgaaatgcaggttgaagcggctatcctggcggaagagattaaaacccttaatccgcagctccatgcgacgttgctcactcaccttgagcagctgcagcagcaccagggaaacaccattgaaattcgttacaccagtcatgagcagtttaaaaaagaaaccgcagacagtcaggcggtgattcgcagcggggagtgttccccgtatgcgaacgttattctctgtgccggcgtgacgttctgaggtcgccgatatggaagccttattgcaactaaaagggatcgataaagcgttccctggcgtcaaggcgctctccggcgcctcgctaaatgtctatccaggccgcgtgatggcgctggtcggggagaacggtgccggcaagtccaccatgatgaaggtgctgaccggtatctactcccgcgatgccggttcgctgctgtggttggggaaagataccaccttcaacggacctaaatcttctcaggaagccggaatcggcatcattcaccaggaactcaacctgatcccccagctgacgatcgccgagaatattttcctcggtcgtgagtttgtgaatcgctttggcaaaattgactggaaaacgatgtatgccgaagctgacaagctattggcaaagctgaacttacgcttcaacagccaaaagctggtgggcgatttgtcgatcggcgatcagcagatggtcgagatcgctaaggtgctgagctttgagtcgaaggtcatcattatggatgaacccaccgacgcgctaaccgacaccgagaccgaatccctgttccgcgtgatccgcgaactgaaatcgcaggggcgcggtattgtctatatctctcaccgtatgaaagagatcttcgagatttgcgatgacgtcacggtcttccgcgatgggcagtttatcgccgagcgcgaagtggccagcctggatgaagatctgctgattgagatgatggttggccgcaagctggaggatcagtatccgcatctggacaaagccccgggcgcggttcgccttaaggtcgacaacctgtgcggctcaggggtggagaacatctcctttattctgcgccagggcgaaatcctcggcgttgccgggctgatgggcgccggacgaaccgaactgatgaaggtgctctacggtgcgctgccgcgcagcagcgggtcggttaccctggatgggcatgaggtcattacgcgttctccgcaagatggcctggccaacggcattgtttatatctccgaagaccgcaagcgcgatggtttagtgctcggtatgtcggttaaagagaatatgtcgctcaccgcgctgcgttacttcagtcgcggcggcggtagcctgaagcataaagatgaacagcaggcggtaggcgattttatccgcctgtttaatgtgaaaacgccgtcgatggagcaggctattgggctgctatcgggcggtaaccagcagaaggtggcgattgcccgcggcttgatgacccgtccgaaggtgctgatccttgatgaaccgacccgcggcgtcgacgtcggggcgaagaaagagatctaccagctgattaaccagtttaaagccgaaggcctgagcatcattctggtctcttcggagatgccggaagtgctgggcatgagcgatcgcatcatggtgatgcatgaagggcacctcggcggtgaattcacacgcgagcaggccacccaggaagtattgatggctgccgctgtgggcaagcttaaccgtgtgaatcaggagtaaaaaagatgaataacccggctgtttctggtcgtcgctacttcacaaaagcgtggctgatggagcaaaaatcgctgattgccctgctggtgctgattgcgattgtctcgaccatgagccccaacttttttaccgtaaataacctgttcaatattctgcagcagacttcagttaacgccattatggcggttgggatgacgctggttatcctgacttcgggcatcgacctgtccgtcggctccctgctggcgctgaccggcgcggtggcggcttccattgtcgggattgaggtcaacgcgctggtggcggtggccgctgcgctggcgttaggtgcggcaattggcgccgtgaccggcgtgatcgtggcgaaagggcgcgtacaggcatttatcgccacgctggtcatgatgctgctgctgcgcggcgtgacgatggtgtataccaacggcagcccggtaaacaccggctttaccgacaacgccgatctgtttggctggttcgggattggccgtccgctggggatcccaacgccggtgtggattatggcgatcgtcttcctggccgcctggtacatgctgcaccatacccgcctgggtcgttatatctacgcgctcggcggcaacgaagcggcaacgcgtctttccggcatcagcgtgaataaagttaaaatcatcgtctattctttgtgcggcatgctggcctcgctggccggcattattgaggtcgcgcgtctctcttccgcgcagccgacggcgggcactggatatgaactggatgcgattgcggcggtggtgctcggcggtaccagccttgcgggcggtaaaggccgtattgtcgggacgctgattggcgcgttgatccttggctttctgaacaacggactgaatttattaggcgtttcatcctattaccagatgatcgtgaaagcggtggttattttgctggcggtactggtagataacaagaagcagtaactgataactctacaggacatcttaactatgaatatgaaaaaactggcgaccctggtctctgctgtagcgttaagtgcgaccgtaagcgcaaacgcgatggcaaaagacactatcgctctggttatctcaacccttaacaacccgttctttgtctcgctgaaggatggcgcgcaaaaagaagcggacaaactgggctataacctggtggttctggactctcagaataacccggccaaagagctggctaacgtgcaggatttaaccgttcgtggtactaaactgctgctgatcaacccaacggattccgatgcggtgggtaacgccgtgaagctggctaaccaggcgaaaattccggttatcaccctcgaccgtcaggcgtcaaaaggcgacgtggtgagccatatcgcgtctgataacgtgctgggcggtaagatggccggtgactatatcgcgaagaaagtcggtgaaagcgcgaagatcattgaactacagggcattgccgggacgtccgcggcgcgcgagcgtggcgaaggtttccagcaggccgttgctgcgcataagtttaacgttctggccagccagccggcagattttgaccgtaccaagggcctgaacgtcatgcagaacctgctgacggcgcatcctgatgtacaggccgtattcgcccaaaacgatgaaatggcgctgggcgcgctgcgtgccctgcaaacggcaggcaaatctgatgtgatggttgttggatttgacggcactccggatggcgaaaaagcggtaaatagtggcaaactggcagcgaccatcgcccagttaccggagcagatcggcgtgaaaggcgttgagacagccgataaagtgctgaagggcgaaaaagtggaaaccagctatccggttgagttgaaactggtcattaagcaataatgtgcgattcggatcggcgacggtccgagggacaacataataaagaaaagcagggcatgcgccaccggattccggtggcgcgctttccgggaatattgattatgaaaaccgcaggcaaacttgtcgtccttggcagtatcaacgccgatcacatcctgaatcttgacgccttcccaacgccgggtgaaaccgttaccggtcatcactatcaggtcgcttttggcggtaagggcgcaaaccaggcggttgctgccggacgcagcggagctaatatcgcctttatcgcctgtaccggcgatgacgatattggcgaacgcgttcgtcgtcagctggaaagcgataatatcgacgtcgcgccggtcagggccgttgccggagaatcaaccggcgtggcgctgatttttgttaacgctgaaggtgagaatactatcggtattcatgctggcgctaacgccgcgctcagcgtggctcaggttgatgcggaaaaagagcgtattgccggcgcgcaggcgctgctgatgcagctggaatcgccgctggaaagcgtactggccgcggcgaaaatcgctcaccagaatcaaacctcagttatcctcaatccggcgccggcacgtgaactgcccgatgaactgctcacactggtggatatcattacccctaacgagaccgaagcggaaaagctcaccggcgttcgcgtagaaagcgacgatgatgcggcaaaagccgccaaagtgctccatgataaaggtattggtacggtgatcattacgcttggcagccgtggcgtatgggccagcagcgaaggtgaaggtcgtcgggttcccggttttaaagtgcaggtggttgataccatcgccgctggcgatacctttaatggtgcgctggtcaccgcgctgcttgaaggtagcgaactggcgcaggcgattcgttttgcccatgccgccgccgctatcgccgtcacccgcaaaggggctcagccctccgtgccctggcgaaaagaaatagacgaatttttacgtcaacaggggtaacgattggctaccatgaaggatgtagcccgcattgcgggcgtttccacttcgacggtttctcatgtcatcaacaaagatcgtttcgttagcgaagctattaccgctaaagtcgacgccgcgattaagagcctgaactacgcgccgtctgcgctggcgcgcagcctcaaattaaatcaaacccgcaccataggcatgctcattaccgccagtaccaatccgttttactcggagctggtgcgcggcgtggagcgcagctgctttgaacggggttatagccttgtgctgtgtaataccgaaggcgatgaacagcggatgaaccgtaatctggagacgctgatgcaaaagcgcgtcgatggtttactgctgctgtgcactgaaacgcatcaaccttcgccggagattatgcagcgctacccttctgtaccgacggtgatgatggactgggcgccgttcgacggcgatagcgatctgattcaggataactctctactgggcggcgatatggcgacgcagtatctgatcgaccagggctatacgcggattgcctgtattgcgggtccgctggataaaactcctgcccgactgcgcctggagggatatcaggaagcgatggcccgagccggactcacggtacctgaaggatatgtgattagcagcgattttgagtttggcggcggtttcagcgccatgcagaagctgctcatgctgccagcgctgccgcaggcggtgtttatcggtaacgatgcgatggcggtaggcgcctatcaggccctttatcagagcggtctgcgtatcccacaggatatggcgctggtaggctatgacgacattgaactggcgcgctatatgacgccgccgttaaccacaattcatcaaccgaaagatgaactgggcgagctggccatcgatgtgctgattcaccgtatggccgacccgggacaaaaacagcagcgcgtacagttaacccccgagctggtggttcgcggctcagcctaacgcttgtgccgctccttaatcaggttgcggccatcttttgctcttaataaggtaaataccagcgccgataccacggtgataacccccatggtaataaaggtgtagtgaaactgctcgatggtatttgcgctatcgaatccttcataaaaccgcagcaccgccgcgctaacggcgaccccgagactgatcgatagctgctgcgtcacggccaacatgctgttgccgctgctggcgttttcatcggttaaatcggcgagcgtgatggtgttcatggaggtgaactgggtggacattgccattcccagaatgaagagcggcagcagcagcatccagatcgacatatccggcgattgcagcgaaaactgagcgatcatcaggccaataaatatcgtgaccccaaccagcgttttacggtaaccaaaccagcgaagaatctgggtgacggttgatttcgcaataatcgaaccgatagccgtaggcgctatcatgcagccagcaataatcgccggataaccgaagccaacctgtaacatcagcggcatcaggaacggaacgcaaccggtacccaggcgcgtggccaggttgcccgcaatcccgacagagaaagtatgcgtcttaaataaagaaagcgaaatgagcggcgtgggatggcggcgagcgtgacgaatataggcccacagtaaaacgatgctcagggcgattaccgccagagccatccatgtggcgacaattttctcgccaaacagctcgattccgctggaaaacagaaccaggctcaggccaaacaggataaaaccgagcgtgtcgaagcggcgccgtggcgtggtgaaatccggcatatacttgcgggcatacacgatcccgataataccgatgggaatattaatcaggaaaatccagtgccagctggcccaggtcaccagtacgccgccgagcacgggaccgaggatagggccgaccagtccaggcatcgtgacgaagttgagcaccggcagcagttcgctgcgcggataggcgcgcagtagcgccagcctggctaccggcatcatcatggccccgccgatgccctgaatgacgcggaagataaccagttccatcagggagttggaaagcgcgcaggccagggaaccgagggtaaacaggctgacggcgatgataaacacttttcgcgtgccgaagcggtcggccagccaaccgctgaccgggataagcatggccaccgtcagcgtatagctgataatggccgactgcatcgctagcggtgaacggttgagactatgagcgatagcgggaagggctgtattcagaatggtggcgtcgagcgcctgcataaaaaaagccatcgctgcgatccatggcagcccggccatactgcgggctttctttttggtcattcgatacctttgctatttgtcggaatggttgggagcgctcaacaacgcctggcaggtgctcagcgcccgcaagccgtcgctatccagaatggcatcaacgattgcctggtgcagatccagtttcaccacttcattctgcgtaatcgacgtgaagtaggtgtgatagacagaatgaaataaagaagcgaaagagatcaggaaagggttgccgctcatttcatatatatgttcatgccaggccatatcgacttcaatccagcgttcgcgctgaaagttcctcttcagctcaaccatctcctccatcaaagcgttgagctgggctttttgctccggcgtccctgaggttgacgccagaaaacaggcttgaggttccagactgccgcgcatcacgaggaaatggctgacaacatcggagaagttatcttctgttaaccaccaggccaggagttctttatcgagaaagttccagctgctgcgtggcatcacccgcgttccgatgcgcggtcgtggtaaaagcatgccttttgccgctagcgtcttcaccgcttcacgcacggcggtgcggctcacgccaaactgctcgcccagttccatctcgcctggaaggatactttctggctgatattcaccgatcaaaattttttgagccagcttctccgctaatacccaggagatattcttttgtgccgccaactgctgtgcgcttaaagacatacgtgccgttcctttctcttttttaccttaccagtatgccatctggcggcttacttcgttggttaaaacggcaaaacgtcggttttttgctacattacgcgccgtaatgatgaaaaaagaggcggttaaaaagttttttgcatttagcccttgtcacttcggaataactccctataatgcgcctccactgacacggaacaacggcttacagcccgccgggtcagcgggattcagcgatgaataccggcagagaaaagcgaaattaaacgcttgactctgaatgaggaaagcgtaatatacgccacctcgcaacggtgagcgaaagccgcgttgcactgctctttaacaatttatcagacaatctgtgtgggcactcaaagtgacatggattcttaacgtcgcaagacgaaaaatgaataccaagtctctgagtgaacatacgtaattcattacgaagtttaattcacgagcatcaaacttaaattgaagagtttgatcatggctcagattgaacgctggcggcaggcctaacacatgcaagtcgaacggtagcacagagagcttgctctcgggtgacgagtggcggacgggtgagtaatgtctgggaaactgcctgatggagggggataactactggaaacggtagctaataccgcataacgtcgcaagaccaaagagggggaccttcgggcctcttgccatcagatgtgcccagatgggattagctagtaggtggggtaacggctcacctaggcgacgatccctagctggtctgagaggatgaccagccacactggaactgagacacggtccagactcctacgggaggcagcagtggggaatattgcacaatgggcgcaagcctgatgcagccatgccgcgtgtatgaagaaggccttcgggttgtaaagtactttcagcggggaggaaggcgataaggttaataaccttgtcgattgacgttacccgcagaagaagcaccggctaactccgtgccagcagccgcggtaatacggagggtgcaagcgttaatcggaattactgggcgtaaagcgcacgcaggcggtctgtcaagtcggatgtgaaatccccgggctcaacctgggaactgcattcgaaactggcaggctggagtcttgtagaggggggtagaattccaggtgtagcggtgaaatgcgtagagatctggaggaataccggtggcgaaggcggccccctggacaaagactgacgctcaggtgcgaaagcgtggggagcaaacaggattagataccctggtagtccacgctgtaaacgatgtcgacttggaggttgttcccttgaggagtggcttccggagctaacgcgttaagtcgaccgcctggggagtacggccgcaaggttaaaactcaaatgaattgacgggggcccgcacaagcggtggagcatgtggtttaattcgatgcaacgcgaagaaccttacctactcttgacatccacggaacttagcagagatgctttggtgccttcgggaaccgtgagacaggtgctgcatggctgtcgtcagctcgtgttgtgaaatgttgggttaagtcccgcaacgagcgcaacccttatcctttgttgccagcggtccggccgggaactcaaaggagactgccagtgataaactggaggaaggtggggatgacgtcaagtcatcatggcccttacgagtagggctacacacgtgctacaatggcatatacaaagagaagcgacctcgcgagagcaagcagacctcataaagtatgtcgtagtccggattggagtctgcaactcgactccatgaagtcggaatcgctagtaatcgtggatcagaatgccacggtgaatacgttcccgggccttgtacacaccgcccgtcacaccatgggagtgggttgcaaaagaagtaggtagcttaaccttcgggagggcgcttaccactttgtgattcatgactggggtgaagtcgtaacaaggtaaccgtaggggaacctgcggttggatcacctccttaccttaaagaacctgcctttgtagtgtccacacagattgtctgatgaatgatgaatttcaaaatgtactgtgaagtgcattgtgaaattttgctctttaaaaatctggatcaagctgaaaattgaaacgacacactgtttaagtgtgttcgagtctctcaaattttcgcgacacgacgatgttttacgaaacatcttcgggttgtgaggttaagcgactaagcgtacacggtggatgccctggcagtcagaggcgatgaaggacgtgctaatctgcgaaaagcgtcggtaaggtgatatgaaccgttacagccggcgatgtccgaatggggaaacccagtgcaattcgttgcactatcgttaactgaatacataggttaacgaggcgaaccgggggaactgaaacatctaagtaccccgaggaaaagaaatcaaccgagattcccccagtagcggcgagcgaacggggagcagcccggagtctgaatcagcttgtgtgttagtggaagcgtctggaaagtcgcagggtacagggtgatactcccgtacactaaaacacacaggttgtgaactcgaagagtagggcgggacacgtggtatcctgtctgaatatggggggaccatcctccaaggctaaatactcctgactgaccgatagtgaaccagtaccgtgagggaaaggcgaaaagaaccccggcgaggggagtgaaaaagaacctgaaaccgtgtacgtacaagcagtaggagcccactggttgggtgactgcgtaccttttgtataatgggtcagcgacttatattctgtagcaaggttaaccgtataggggagccgcagggaaaccgagtcttaactgggcgttaagttgcagggtatagacccgaaacccggtgatctagccatgggcaggttgaaggttgggtaacactaactggaggaccgaaccgactaatgttgaaaaattagcggatgacttgtggctgggggtgaaaggccaatcaaaccgggagatagctggttctccccgaaagctatttaggtagcgcctcgtgaactcatcttcgggggtagagcactgtttcggctagggggtcatcccgacttaccaacccgatgcaaactacgaataccgaagaatgttatcacgggagacacacggcgggtgctaacgtccgtcgtgaagagggaaacaacccagaccgccagctaaggtcccaaagtcatggttaagtgggaaacgatgtgggaaggcccagacagccaggatgttggcttagaagcagccatcatttaaagaaagcgtaatagctcactggtcgagtcggcctgcgcggaagatgtaacggggctaaaccatgcaccgaagctgcggcagcgacactatgtgttgttgggtaggggagcgttctgtaagccgttgaaggtggcctgtgagggttgctggaggtatcagaagtgcgaatgctgacataagtaacgataatgcgggtgaaaaacccgcacgccggaagaccaagggttcctgtccaacgttaatcggggcagggtgagtcgacccctaaggcgaggccgaaaggcgtagtcgatgggaaacaggttaatattcctgtactcggtgttactgcgaaggggggacggagaaggctatgttggccgggcgacggttgtcccggtttaagcatgtaggcggatgttccaggtaaatccggaacgtcactaacgctgaggtgtgatgacgaggcactacggtgctgaagtgacaaatgccctgcttccaggaaaagcctctaagcatcaggtaacatcaaatcgtaccccaaaccgacacaggtggtcaggtagagaataccaaggcgcttgagagaactcgggtgaaggaactaggcaaaatggtgccgtaacttcgggagaaggcacgctgatggtaggtgaagtgacttgctcatggagctgaaatcagtcgaagataccagctggctgcaactgtttattaaaaacacagcactgtgcaaacacgaaagtggacgtatacggtgtgacgcctgcccggtgccggaaggttaattgatggggtcatccgtaaggagaagctcttgatcgaagccccggtaaacggcggccgtaactataacggtcctaaggtagcgaaattccttgtcgggtaagttccgacctgcacgaatggcgtaatgatggccaggctgtctccacccgagactcagtgaaattgaactcgctgtgaagatgcagtgtacccgcggcaagacggaaagaccccgtgaacctttactatagcttgacactgaacactggtccttgatgtgtaggataggtgggaggctttgaagtgtggacgccagtctgcatggagccatccttgaaataccaccctttaatggctggtgttctaacgtgggcccgtaatccgggttgcggacagtgtctggtgggtagtttgactggggcggtctcctcctaaagagtaacggaggagcacgaaggtcagctaatcctggtcggacatcaggaggttagtgcaatggcataagctggcttgactgcgagcgtgacggcgcgagcaggtgcgaaagcaggtcatagtgatccggtggttctgaatggaagggccatcgctcaacggataaaaggtactccggggataacaggctgataccgcccaagagttcatatcgacggcggtgtttggcacctcgatgtcggctcatcacatcctggggctgaagtaggtcccaagggtatggctgttcgccatttaaagtggtacgcgagctgggtttagaacgtcgtgagacagttcggtccctatctgccgtgggcgctggagaattgaggggggctgctcctagtacgagaggaccggagtggacgcatcactggtgttcgggttgtcatgccaatggcattgcccggtagctaaatgcggaagagataagtgctgaaagcatctaagcacgaaacttgccccgagatgagttctccctgaccctttaagggtcctgaaggaacgttgaagacgacgacgttgataggccgggtgtgtaagcgcagcgatgcgttgagctaaccggtactaatgaaccgtgaggcttaaccttacaacgccgaagatgttttggcaaattgagagattttcaggcaagattcagagttgagtacgcaataatttgcgcagcagcaaggcgacaagcgaaggaaaggaaggagcatactgaggtatgtgactgactttacgagcgcgggcaacgcagctgatgcgataaagaattgcgtactgagcacaaagaatttgcctggcggcactagcgcggtggtcccacctgaccccatgccgaactcagaagtgaaacgccgtagcgccgatggtagtgtggggtctccccatgtgagagtagggaactgccaggcatcaaacaagtgaagagcccatcctgacggatgggctttttgcgtttttgtcgcctgaaactatcagcagatgccttcagaaggcgcgatcatggctatatctctgcaataactatcggtcctcgttaaacccctttaaccactgcataataaaagcggctatttgcgggacatcatttaaatctaacaatggaagcgacgtctcgaccggcgtatcgctggctatggcaatcacgtcatcgtcataaactaattcttcaatgctatgtccgctgttttgccgaaaaagcaggattttgggcacagcttcatgcttaaaaccctcaaccaggactaaatctaacgttgatgcatccattcggctaaccagccattccagatccagcggaggctcttcgggtgtttccgtcattaatgcccaacgctgggagctggcgacaatcgtctgagccgctccggctttacgcagttcatagctgtctttaccgggcttatccacgtccatatcatgatgagtatgtttaattagccctggccgtaagcctcccgcgcgcagtgccggaatcagcgacttcagtagggtggttttacctgtaccgctccaggctgcgatggctaaaagcgggatcatgatggcacctgcatacgttgcaaatcgtcgagagtattgacgttaataaatgctgattttacatcgctaaaatcgacgctatgaccgccaattttgcgcagaaataccattacccgtctttctcctgccgccagatacgtttccagttcgccgatcgcctcgcgattcaccagagcaatggccggatggtcacgttcaccatcgtgtacccaaacggctggagatgattttctctgctgtattaagcgcgtcgccagaaatgatgggataaatggcgtatcacagggacaaaacagaaaccactcgccctcaacctgatgcattacggaaagcatgccggccaacggcccgggaaagtcgttcagagagtcggtaataatcgggtagccgctgcttcgccagcaatcaagattgcggttagcgctaattaccagctttgtaacctgcggctgcagcgcatcggcgacatgacgccacagggctttacctttcagcagctgtaatcctttatctattcctcccatgcgtgagcctcttcctcccgccagcacgacgccggttatgaccttgccctgcatattaatatcgcctctttcattgtgggattgtccctgctaacgtattcctatcaagagtaaggagcattgctatgaaatgtaaacgtctgaatgaagtcattgaactcctccagccagcctggcagaaagaacccgagctgaatttaatgcaatttttgcaaaaactggcgaaagaggccggatacaccggtgagttgaacgatctctccgacgatattctgatttatcatctgaagatgcgcgactcggcaaaagaagctgttattcccgggattcagaaagattatgaagaagattttaaaaccgcgctgctacgcgctcgcggcgtgattaaagagtaaaaggttgtaagcgctgccgcggaatcggcaatgagatgatatcctgtatcattcgtacgattatcggatgtcaggatgcacgataaggctttcacttttcagacgcttcacccggataccatcattgatggcttatttgatctgggaatgcgggtggactccggtctcacaccgcttaatagctatgagaaccgggtttaccagtttcaggacgaagatcgtcgccgctatgtggtgaagttctatcgtcctgagcgttggtcagcccaacaaatcctcgaagaacatcagttttccctccagctcgtgcaggacgaagtccctgtagcggcgccgttgtcgtttaacgacagtacccttcatcagcatcagggattctttttcgccgtattcccaagcctgggtggacgtcagtttgaggcggataacctcgatcagatggaatgggttgggcgctaccttggccgtctgcatcaaactggacgcaaacagcgttttgtcgctcgtccggagatagggacgaatgagtatcttcttgagccacgccaggtctttgagctttccccgctgatacctgcaggtctgaaagaggcttttctcagcgctaccgataagctgattgatgcggtaatggcgcaatggcacggacgcgccaatattttacggttacacggtgattgccatgcgggaaacatcctctggcgcgatgggccactgtttgttgatttagatgattcacgtaatggacctgctatccaggatctgtggatgttgttgaacggcgataaagccgagcaacggatgcagcttgagatgatcattgaagcgtatgaagagttcagcgctttcaataccgatgaaattgccctcatcgaacctttacgtgcaatgcggttagtttattatctggcgtggttattaaggcgctgggaagatcccgcttttcctaaaaacttcccgtggttaaccggggaagattactggcgcgggcagacaacaacttttcttgagcaggtaaaggttctgcaggaaccgcctcttcagttaacgccaatgtattaatgtgatatatccaggagagaattaatcatgaaaaaaatttggctggcgctggctggtatgattctggctttcagtgcatccgctgcccagatcaccgacggtaagcagtacattaccctcgataagcccgttgccggtgagccgcaggtgctcgagtttttctcgttctactgcccgcattgctatcagtttgaggaagttcttcatgtatcagataacgtgaagaaaaagctgcctgaaggcgtaaaaatgacgaaataccacgttgagttcctgggtccgttaggcaaggatctgactcaggcgtgggccgttgcgatggcgctgggcgtggaagataaaatcaccgtgccgatgtttgaagcggtacagaaaaaccagaccgtccagaccgtggccgatatccgtaaggtcttcgttgacgccggcgttaaaggtgaagattacgatgcagcctggaacagcttcgtggtgaaatccctggtggctcagcaagagaaagccgccgctgatttccagctgcagggcgtgccggctatgtacgttaacggtaaataccagctaaacccgcagggtatggataccagcaacatggacgcatttgttgcccagtatgccgataccgttaagcagctcgttgagaagaaataaaaaataaacgccggttactgaccggcgtttttcttttctgcgcccacaattatttctctgcctgctgcattatttccgttagctgccgatctttctcttcccaaagcctgtttagccagcgctgaaagcgtcgcttaaagtttttgtcatttacataatcgccgtgcagctcttccatcacaggttcaagactgactcgcaccacaacccgcgttaatcggccgctcagcatgtcataaaacggcttttggttgttttccggatagcataacgtgacgttcaaaagcttatcaaactgcgagccgagcacgtttaatgccatggcaatacccgcagcctttggcgataacagattctggtaaggcgaacgggtctgctgttgcttttcttccgtgaaacgagagccttcgacaaagttaacaatcgttgttggatgcgcgcggaatttctcgcaggagcggcgagtggtttcaacatctttgccccggcgttctggatggcggagtaaatagcctcgggaatagcggcgcataaaaggcatatccagcgcccagcaggccagcccaataaacggcacccaggcgagctgttgcttgaggaaatatttattcatcgggatatgtttgcgaaacagcacgcaaagcaccacgatatctgcccagctatggtggttgctgatgagcagataccagtttttcttattcaggccatccaggccctgtacatcccatttaagccagggattaagacgcagcagcagagccagcccttcacaccagcagtacatcatgaaattgcaaaaaatggatatcgagcgccagaccgcaggaataggcacaagaagtttaatcagcccggcgacgatgattggcaccgagcagattatggtgactatgatagtcagggcgatactcagcgggagcgttatcgcggcgagtaatctcgacatagttaatttattcagaaagttaggctgtcaaagaacgcgtttaaacggcgcaagaggctgattttaccagaaaatagcgtaaataacgggtcttaccagaacagaaaaattttcggatcttatatccacatggaacattgagtcgccatgatgttattaaagcaaattatgagtgtataacttaatgataaatatgaaataatttgtttatggatgatttgattaacgattgtttggctgtcgttataaaaatattcacaaagttatccacaggatagcccataacgcgatcgaaaggatcgcagaatcttttcgacgaaatgcgggaaaaattcaggatttaatgcccgtctgtggcatcctttaccgataatctgataaacaggcacggaaattatggttcagatcccagaaaaccctctcatcctcgttgacggctcctcttacctttatcgggcatatcacgcgttccccccgctgacgaatagcgctggtgaaccgacaggcgcaatgtatggcgtgctgaatatgctgcgaagcctgatcctgcagtatcaaccgacccacgctgtcgtcgtgtttgatgccaaggggaagactttccgtgatgaactgtttgagcactataaatctcatcgcccgccgatgccggacgatctgcgtgcgcagatcgagccgctgcatgccatggtaaaagcgatgggcctgccgctaatggctgttcctggcgtagaagccgatgatgtcatcggtaccctggcgcgcgaagctgaaaaggtcgggcgtccggtactgattagcaccggcgataaagatatggcccagctggttacgccgggtattacgctgattaacaccatgaccaatactatccttggccccgatgaagtggtgacgaaatacggcgtaccaccggagctgatcatcgattttctggctctgatgggagattcatcggacaatattcccggcgtacctggcgtgggagaaaagactgcgcaggcgttactgcaggggctgggtggtcttgatacgttatatgctgagcctgaaaaaatcgccgggctgaccttccgcggcgcaaaaacgatggccgcaaagctggaacagaataaagaggtggcatacctctcttatcagctggcgacgatcaaaacggacgttgagctggagctgggctgtgaagatttgctggttgcgcaacccgtcgctgatgaactgctcacgctgtttaaaaaatatgaattcaaacgctggatcaccgatgtagagtccggcaagtggatgcaggcaaaaggcgctaagcctgcggcaaaggcggttgtagcggtggctgacgtggccgatgcggaggaggaaaccgcgacggcgctctcttctgaaaattatgtcacgatccttgatgaagaaacattgttgacctgggttgagagcctgaagaaagcgccgctttttgcctttgataccgaaactgacagcctcgataacgtatccgccaatatggtcggcttatccttcgccattgagcctggcgttgcggcctatgtaccggttgcccatgattatctggatgcaccggatcagatcccgcgcgaccgtgtccttgagctgctgaaaccgctactggaagatgacaaggttctgaaggttgggcaaaacctcaaatatgaccgcggtatcctggctaactacggcattgaactgcgcggtattgcctttgataccatgctggaatcctacattcttgacagcgtggcgggccgccatgatatggatagcctctccgatcgctggctgaagcacaaaaccattacctttgaagagattgcgggtaaaggtaaaaaccagctcacattcaatcagatcgcgctggaagaagcgggccgctacgcggcggaagatgccgatgtcacgctgcagctgcacctcaaaatgtggcctgaacttcagcaaaatgaaggcccgctgaacatctttaaaaatattgaaatgccgctggtgccggtgctatcccgcgtggagcgtaacggagtgaagattgatccggccgtgctgcatgcgcattctcaggagatagccaaacgcctgattgagctggagaagaaggcgtatgatatcgcgggtgaggagtttaacctctcttcgccgaagcagctgcaaaccatcctgtttgaaaaacaaggtattaagccgctgaagaaaaccccgggcggcgcgccgtctacctcggaagaggtgctggaagagctggcgctggactatccgctgccgaaagtcatcctcgagtatcgtggtctggcaaaactcaaatccacctataccgataagctgccgctgatgatcagcccgaaaacgggccgggttcacacctcttatcaccaggcggttacggcaacgggacgtttgtcgtctacagacccgaacctgcagaacattccggtgcgcaacgaagaagggcggcgtatccgtcaggcgtttattgctccggaagattatctcattgtctctgccgactactcgcaaattgaactgcgcatcatggcgcatctttcccgcgacaagggcctgctgaccgcgtttgcggaagggaaggatatccaccgcgcgacggcggcagaggtctttggtttgccgctggagagcgtcagcagcgaacagcgccgcagcgcgaaggcgatcaacttcggcctgatttacggcatgagcgcattcggccttgcgcgccagctcaatattccacgcaaagaagcgcaaaagtatatggatctctactttgagcgctatccgggcgtgctggagtatatggagcgcacccgcacccaggccaaagagcaggggtatgttgaaacgcttgatggccgtcgtctctacctgccggacatcaaatccagcaacggcgcgcgccgcgccggtgccgagcgtgcggcgatcaatgcgccgatgcagggaaccgctgccgacattattaagcgcgcgatgatcgccgtagatagctggttattaagcgaaaaaccgcgcgtgcggatgattatgcaggtacacgatgaactggtctttgaagtgcataaagacgaccttgaggcggttgcgaaaaagatccacgaactgatggaaagcagcacgacgctggcggttccgctgctggtggaagtgggtagtggagaaaactgggatcaagcgcactaagtattcggtaaggaaggtcatttcttgtaagtgagtaacataacttatcgcattttgtgatgatcatttgaatttgctatgtaaagagtgaaaaaaaactacaaaaaatgctttatccgtaaccgaaagaagagtagagttaaagacgtagggtacagaggtaagatgttctatctttcagaccttttacttcacgtaatcggatttggctgaatattttagccgccccggtcatttatgaccggggcgttttttattgcgcgaaagaaaattttttgcgtatcgatgctgatgaggcgggctacccggatagagccccacgcgccgctatccggagaagttagcgagattattcgccgtcttcagaggcttcctgaggagggatatcgttataccagctatccagcttctgccgtagtttatccacgccctgcttcttcagggaagaaaacgcttcgacctgcacatctccgttaaaggcggtgaccgcttcacgaaccatggcgatctgcgcttttcgcgcgccgctggccagcttatcggctttggttagcagcaccagtaccgggatatcgctttccaccgcccattggatcatctgctgatcgagatctttaagcggatgacgaatatccatcaacacaaccagccctttcagacagaggcgtttctccagatattcacccagcgcgcgctgccacttgattttcatctcttccggaacctgggcatatccatagcccggcaggtcgaccaggcgtttgccttcagcgacttcaaacaggttaataagctgcgtacggcctggcgtcttcgaagtacgcgcgaggcttttctggttagtcagcgtgttcagcgcgctggatttcccggcgttagagcggccagcaaaggccacttcaataccggtatcggcaggaagatggcggatatctggcgcgctagtgacaaaatgcgtcagttgataattccagttggtcaagacggtcgtctccgttaaatcaggctttgacggggattatacctgaacaacagaaaaaggctgtttttaccgcacctcatcgctgtaagttaaaaccacagtctttgtgagacattggctattggttatatgcgaaattcatgagaaaagtctgattaaaaataatacaaagttatataaatcattgcattaaaatgaaagaaaattctgaaactcgttttttttctgtacagtcggttgtaggtttcccgcaaaccagtaaagtagcggtcaagggcgaggatgctaacaggattatgactcaggatgaggagtcaggaagcgccaggaggcgaagactacggattgtcaggatgacaaacgtctggagacgttttaaaaggaaatggatgtaacagggatcgttggtagctaaaggaaagacagggtgtgtcgttagctaacatggaaagtagaagcccattaagggttatcagtgcggaaaaaggcgacagagtaatctgtcgccttttttctttgcttgctttctgctagattccgcctcaattctatactgaagaaaacggcctgaagattacacaacatgaaaaaaccgacatccgtacctcgcggcaaaaaaaatcgcaaaacgcgtgaagaattgaaccaggaagcccgcgagcgcaagcatcagaagaagcatcgcggccacgcggcaggaagtcgtgcgaccggcggcgacaccgcttcagcaggtaaaaaacaaggtcagcagcaagatccccgaattggcagtaaaaaaccaatcccgctgggcgtaactgaaaatgctccggcgattaagcagcataaaccaaagagcgagaaacctatgctttcaccgcaggctgagctggatttgctggagaacgatgagcgcctggacgcgctgctggaacgtctggaagagggcggtaccctgaatgctgaagagcaagcctgggttgacgccaagctggatcgtattgatgagctgatgcagcagctgggcctctcatacgatgatgacgaagatgaagaagaggaagagcgcaaagaagatatgatgcgcctgctgaagggtggaaactaacgtttgcaccccatcggattcccggtcctgcttataacccttctggttatatgttatctgctgtggttattcgttaaactacgacggttgtcgcggcgtcagaaatggctgcgcaaccggctcattacccgaggtgcggttgggccggggcggcgtacccgccgacggtaccatcggaaggagtgagcatgtctgtgcagttaatcgactgggatctggccctgatccagaaatataactattccgggccgcgttatacttcgtatcccaccgcgctggagttttctccagaatttggcgccgctgaatttgatgcggcggtagcccgctatccgcagcgtcccctctcgctgtacgtgcatatcccgttttgccataaactctgctatttctgcggctgcaacaaaatcgtcacccgtcagcagcataaggccgaccagtatctggatgtgcttgagcaggagattattcatcgcgcgccgctttttgctggccgcaaagttaatcagctgcactggggcggcggtacgccaacctatttaaacaaggcgcaaattagtcgtctgatgggtctgctacgtacccatttcaattttaacgcggatgcagagatctccattgaggttgatccgcgcgaaatcgaactcgatgtcctggatcatttacgcctcgaaggctttaatcgcctgagtatgggcgtgcaggacttcaacaaagaagtgcagcgcctggtgaaccgcgagcaggatgaagcgtttatcttcgcgctactcaaccacgcgcgcgatatcggctttacctctaccaatatcgacctgatttacggtctgccgaagcaaacgccgcagagcttcgcgtatacgctacagaaagtggcggagctcaaccccgatcgtctgagcgtattcaactatgcgcatctgccaacgctctttgctgcgcagcgcaaaatcaaagacgccgatctgccttctgcagaacagaagctggacattcttcaggagacgattgtttcgctgacggccgcgggatatcagtttatcggcatggaccactttgcccgtccggatgatgagctggcgatagcccagcgtgaaggtatcctgcatcgtaacttccaggggtataccactcagggagacaccgatctgctggggatgggcgtctcggcgatcagcatgattggcgattgctatgcgcagaaccagaaagagctgaagcagtattatcagcaggttgatgaaaccggaacggcgctgtggcgcggtattgcgttgacgcgcgatgactgcattcgtcgcgacgtgattaaggcgctaatttgtcacttccgtctcgacttcgctgcggtagaagcgcagtggaatcttaccttcgatagctactttgccgacgatatgaaattgctggcgccgctggccaaagatgggctggtggatgtggatgagaagggcattcaggtgacgccgaaaggccggctgctgatacgcaatatctgcatgtgttttgatacgtatctgcgccagaaagcgcggatgcagcagttttcccgcgtgatataaagcatacccccactccaggaaggagcgggggtattatcagctaaacagcccaaccatcgccgcgcacagaacggcagctaccgccgtctgcggcgtatgacccgctgcaacaccgctcgatataatattaataaatgattcaagcatgatttctcccccgtctttccgggcaagatcatactcaacgcatggcaacagtaaagtacaaaatagcagcagtttgcgctggatgactattttttactcgccgccgcgctgctactccattcccagctcttttagcttacgcgtcagggtattacgaccccagcccagcaggcgagccgcctcttgtttatgcccctgcgtgtggcgtaacgcggtggtcagcagcgtgcgctccatctccggctgcgcttccgagagcaggttttgatgaccggaacgcaaagcgcgatcggcccattgccccagcagcgtggcccagctatccggcagcatttgcgtcgggttatccggtatcgccgtttcaaacagctcgctgggaagatcctgcgtcagaacctcctgacctgcggccattaccgtcagccagcgacaggtgttttccagctgacgtacgttgcccggccatgccagtcgggttaacgccatctccgtctccggatgcagctgtttggcctcgacgcccagctcacgggcggcgatttgcaggaaatgtctcgccagtcgcgggatatcttcccgacgctcgcgcagcggcggcagatggacgcgaatcacgttcaggcggtgaaataaatcctcgcggaattttccttcctggacgcgcagctcaaggttctggtgggtggcggcaataatgcgtacatccaccttcaccggcgcatagccccccacgcgataaaactggccatcggccagtacgcgcagcagacgagtctgtacgtccagcggcatatcgccgatctcgtcgaggaacagcgtgccgccgtctgcctgctcgaatcgcccctggcgcacggtattggcgccggtaaaggcccctttctcgtggccaaacagttctgactcaatcagatctttcggaatggccgccatatttagcgcgataaacggcgccttggcgcgcgggctgtggcggtggagagcgtgggcaaccagctctttaccggtaccagactcgccgttgatcagtacgctgattgatgaacgcgacaggcggccgataatgcggaagacgtcctgcatggccggcgcttcgccgatgatatcggccgttgggctattaatcggcgcattacgcggctgctgctgttcctggtaatggctaatggcacgatcaaccagcgccaccgcttcatcgatatcaaacggtttcggcagataatcaaaggcgccctgctgataggcgctgaccgccgcgtcaagatccgaatgcgccgtcattatgatgaccgggagcatcggattgcgctgtttaatttgctttagcagcgccagtccatccattcccggcatgcggatatcagacagcagcacatccggggttttggtcgtgagggcatcaagcacctcgttgccgctttcaaacgtcgtacaacttaagcctgccccggtgagcgcgcgttcaagcacccaacggatggagctatcgtcgtcaacgatccatgctatccctcgttgcataaacacctctacttccgaataggcaggtacaccgagaattcggtatgccctggccaactggtaaattcaattttgccggagtgctgatcgataaggctgcgggcgatagacagcccgagtccggtgccgccttcgcgcccgctcaccatcggataaaacagcgtatcctgtaagtgagacggtattcccgggccgttatcttcaacgtcgatacgcgcagcgaggcggtagcgcacgccgtgcagggttaactgaaaggccgtacgggtgcgcagagtgatttcgccgccctccggtcccagagcctgcagcgcatttcggacgatattcagcagcacctgttcaatttggtccgggtcgtgcggcagttctggcaggctggggtcatagtcgcgaaccagcttgacgttatccggcagctccatcgacacaagctttaccacccgctcagcgaccttgtggatgctttctgttacgtgcattccgggatgctgtggtcccagcagacggtcaaccagatttcttaaccgatcggcctgttcaataatgactttggtatattccatcagcgcaggatcgggcagcgctttgctcagcagctgtgccgcgccgcgcagaccacccagcggatttttaatctcgtgggccaggccacgcactaagtcgcgagcggcaatctgctgtgcgtgctgtagctgctcctggctcagacggcgctgattatccatcggcgccatttccagcaggatatagccttcaggcaggcgttgcgccgtcagggaaaggatgtgcgagcggccatcaatgaccagcgtcacttcgttatcggtaaacccttgacccgcagcgaggctctcctgcatgaggccgatattcagcgagaaatagctcaacagctccggcagcggcgtgccgaataatttacgcgaactttgcgccagcagctgctgcgccgccgggttcgcgtaatgcaccgccaggtcgtcatcgaccagtaagatactgttgattaaagagttaaggatctgcccagcatcgggcagtgtgcctgttgccattcgacagtctcctgaaaatgagtgcactattttagtgcagtatagctttttatgtataaaaagctcatgagatcagcgtgttggtggagaaaaaagcccatcctgagatgggctgaaagtttccacggcaacaaaacatccttggtatcccacgccacaacacggaataccgcggatttacagcaaaattagacgctgtagtacagctcgaactcaaccgggtgcggagtcatacgtacgcggtcgttttcttcaatacgcagggcgatgtaagcatcgatagcgtcgttggtgaatacgccaccggcggtcaggaattcacggtctgcgtccagcgcgttcagtgcttcttccagagaacctgcaacctgtgggatctctttcgcttcttccggcggcagatcgtacaggtttttatccatggcttcgcccggatggattttgttcttgataccgtcaaggccagccatcagcagcgcagcgaagcacaggtacgggttagccgccgggtccgggaagcgaacttcgatacggcgcgctttcggagaggtgacaaccggaatacggatagacgcggaacggttacgggcagagtaagccagcataaccggcgcttcgtaacccgggaccagacgcttgtaggagttggtggtcgggttagccagggcgttaatcgctttagcgtgtttgataacgccgccgatgtagtacagcgcttgttcagacaggcctgcgtatttgtcgccagagaacaggtttacgccgttcttggagagggacatgtggcagtgcataccggaaccgttatcgccaaacatcggttttggcataaaggtcgcggttttgccgaaacggtgtgcgacgttgtgcacaacgtatttgtaaatctgaatttcgtccgcttttttggtcatggtgttaaagcgggtagcgatttcgttctgacccgcagtcgccacttcgtggtggtgagcttcaacaaccaggcccatctcttccatgatcatacacatggtggagcggatatcctgagaggagtctaccggcggaaccgggaagtaaccgcctttcacgcccggacggtggcctttgttgccgccttcgtatttggtggaggagttccatgcgccttcgatatcatcgatagcaacgtgggaaccggagatggacgcaccaaaacggatgtcgtcgaacaggaagaattctggttctggcccgaacagtacggtgtcagccaggccggtagagcgcagatactcttcagcgcgcttagcaatggagcgcgggtcacggtcatagccctgcagcgtgccgggttccaggatgtcgcagcggatgatcagcgtcggttcttcatagaacggatcgatcagcgcggtggttgcatccggcatcaggaccatgtcggattcgttaatacctttccagccgccaatcgaggagccatcaaacattttgccttcttcgaagaattcggcatttacctgatgagaaggaatagtaacgtgctgttctttacctttggtatcggtgaagcgcagatcgacaaacttcacttcatgctcgttcagcatcgtcaaaacgtgttcagcggacatacttaaactctcccggattggtcattgtcgtcgtggaaacgaaaactttttaactacgaaaagtggcgttgttgccttaaaaaatataaagcgaaatctgtgccaacttttaaattgcccccaaaaggcgttatcatgcacatcatcgtgcaaaagggctgcaccaaaatgaatgcattgcaccaatatagtgcatttgtgtgaacattgggcacttatttggtgcaattgacctttaataacccttttaacgctccgtgaaagcgatcacaaagaatctctgcaatacttgtttgcggaggatgtttgtgatcctgttttgtactgcgattaatccgtgtacaataacgcgctatttctaatgcctgaggcaaagttgtgatcgaaaatttgcgtaatatcgccatcatcgcgcacgttgaccatggtaaaactaccctggttgataagctgctacagcaatccggtacgttcgacgcgcgtgccgaaactcaagagcgagtgatggactccaacgatttggagaaagagcgcgggattaccatcctggctaaaaacaccgctatcaaatggaatgactaccgtatcaacatcgttgataccccagggcacgccgacttcggtggtgaagttgaacgtgtcatgtccatggttgattccgttctgttggtcgttgatgcaatggatggtccgatgccgcaaacgcgcttcgtgaccaaaaaagcctttgctcatggcctgaagccaattgttgttatcaacaaagttgaccgtccgggcgcgcgtcctgactgggttgtcgatcaggtattcgacctgttcgttaacctcgacgctaccgacgagcagctggacttccctatcgtttacgcttctgcgctgaacggtatcgcgggtctggatcacgaagatatggctgaagacatgacgccgctgtatcaaaccatcgtcgatcgcgtaccggcgccgaacgttgaccttgatggcccgctgcagatgcaaatctcccagctggactacaacaactacgttggcgtcatcggcatcggccgcatcaagcgcggtaaagtgaagccgaaccagcaggtcactatcattgatagcgaaggcaaaacccgtaacggtaaagtcggtaaagttctgacccatctgggccttgagcgtatcgagagcgacgtcgcagaagctggcgatattatcgcgatcaccggtctgggcgaactgaacatctctgacaccatctgcgatacgcagaatgttgaagcgctgccggcgctgtccgttgatgagccgaccgtctctatgttcttctgcgttaacacctcgccgttctgtggtaaagaaggtaagtacgttacctctcgtcagatccttgaccgcctgaacaaagagctggtacataacgtcgcgctgcgcgttgaagaaacgccggatgcagacgcattccgcgtttctggtcgtggtgaactgcacctgtccgttcttatcgagaacatgcgtcgtgaaggtttcgaaatggcggtttcccgtccgaaagttatcttccgcgaaatcgatggccgtaagcaagagccgttcgaaaacgtcacgctggacgttgaagagcagcaccagggttctgtgatgcaggcgctgggtgagcgtaaaggcgatctgaaaaacatgaatccagatggcaaaggccgcgtacgtctcgactacgtgatcccaagccgtggtctgatcggcttccgttcagaattcatgaccatgacctccggtaccggtctgctgtactccaccttcagccactacgacgacgttcgtgcgggtgatgtgggtcagcgtcagaacggtgttctgatctccaacggccagggtaaagcggttgcgttcgcactgttcagcctgcaggatcgcggtaagctgttcctgggccacggcgcagaagtttacgaaggccagattatcggtattcacagtcgttctaacgacctgacggtaaactgcctgaccggtaagaaactgaccaacatgcgtgcgtccggtactgacgaagcaacggttctggttccgccggttaagatgaccctggagcaggctctggagttcatcgatgacgacgaactggtagaagtcaccccgacttctgtccgtatccgtaaacgtcacctgaccgagaacgaccgtaaacgcgcgatgcgcggtgcgaaagaagattaattaacgcttctttccgctatctgaaccctgcctcaatggcagggtttcttttttgtacaaagccctgccgcccgtagtcaaactccccctttcccgctacagttaattttccacggtgcaaaaggagaggaccatgctctatatctttgatttaggtaatgtgattgtcgatattgacttcaaccgggtgctcgggacgtggagtgatttaacgcgcattccccttgcgacgctgcagcagcatttcaccatgggcgaagcgttccaccagcatgagcgcggtgaaattagcgacgaagattttgcggcggcgatgtgccatgaaatgaacatgtcgctaagctacgagcagttctcccacggctggcaggcggttttcgttgccctgcgcccggaggttatcgcgattatgcaaaaattacgcgagcaggggcatcgcgttgtggttctgtccaacacgaaccgtttgcatacgactttctggccggatgagtaccctgatatacgcgccgttgctgaccatatctatctttctcaagagatggggatgcgtaaaccggaagcgcggatctatcagagcgtcctcgacgctgaaggtttcgccgctgacgatacggtcttcttcgatgataacgcggacaatatcgccggggctaaccagctgggcataaccagtattctggtgaccgggaaggaaaccatccccaactactttgctaaacagctatgctaaaaaccgttcatcaaaaaacaacgcgccatctgcggccgctggtcgcctggctaaagctgtatggcggcgtattgatgaagataatatgacgaccctggcaggcaacctcgcctacgtgtcgttactctcccttgtgccgctgattgccgtcgtgttcgcgctgttcgcggcatttccgatgttttctgatgtcagtattcagattcgccactttattttcgccaatttcattccggcaaccggagatgtcattcagggctatattgagcagtttgtcgccaactccagccggatgaccgctgtgggcgctttcggcctgattgtgacatctctgctgctgatgtattcgattgatagcgcgttgaacaccatctggcgcagtacccgaacccggcccaaaacctactcctttgcggtttattggatgatccttaccctggggccgctgctggcgggggccagcctggcgatcagctcctatctcctgtcgttacgctgggctagcgacctgaatagcgtgattgacgatgtgctgcgtatttttccgctcattttatcctgggtggcattctggctgctttacagcattgtgccgacggccgaggtgcgtaaccgcgatgcgataatcggttccctggtcgcggcgctgctctttgaggcgggtaagaaagcttttgctttatatatcaccgcgttcccgtcatatcagctgatttatggcgtgcttgccgtggtgcctattttgtttgtctgggtgtactggacgtggtgtatcgtcttgcttggcgctgaaattactgtcactctcggtgaataccgcaaactgaaaaaagaagaaacagaacaatcatgattgcattaattcaacgcgtatcccgagctagcgttaccgtggagggtgaagtgacgggcgaaatcggccccgggcttctggtgctgttaggcgtcgagagagacgatgatgagcaaaaggcgaaccgcctgtgcgagcgcgtgctgggataccgtatttttagcgatgctgaaggcaaaatgaatctgaacgtgcagcaggctggcggcagcgtgctggtggtttcgcagtttacgctggcagccgataccgaacgcgggatgcgtcctggtttttcgaaaggggctgcaccggataaagcggaagcgctgtacgagtatttcgttgagcgctgccgccagcagcaaatgaatacgcagaccgggagatttgctgccgatatgcaggtttctctggtgaatgatggtcccgtgaccttttggttgcaggtatgagccagcttccgggcaggctgcgggtaacaaaagagagtacagctatgtatcaccttcgtgtaccgcaaacagaagaagagttagagagctactaccagttccgctgggagatgctgcgtaagccgctgcatcagccgaaagggtccgagcgcgatgcgtgggatgcgatggcgcaccatcaaatggtggtcgatgaagagggcaatctggttgccgtcgggcggctgtatgtgaatgcggaaaacgaagcttctatccgttttatggccgtccatccgtcagtacaggataaagggctgggaaccctgatggcgatgacgctggagtccgtcgcccgtcaggaaggcgttaagcgcgtgacctgtagcgcccgcgaagatgcggtggagttcttcgctaagctcggttttgtgaaccagggcgaaatcacgacgccgacgaccacgccgatccgtcattttctgatgattaagccgatagcctcgctggacgatattttacatcgcggcgactggtgcgctcagctgcagcaggcctggtatcagcatatccctctcagcgagaaaatgggcgtgcgcattcagcagtataccgggcaaaagtttatcaccaccatgccggaagccggtaaccagaacccgcaccatacgctgttcgccggcagcctgttttctcaggcaacgttaaccggctgggggcttatctggctgatgctgcgcgagcggcatcttggcggcacaattattcttgccgatgcgcatatccgctacagtcagcctattagcggacgccccagcgccgttgccgatcttggctcgttaagcggcgatcttgaccggctggcgcgaggccgcaaagcgcgcgttcagctgcaggttgagctatttggcgacgagcggctgggcgcggtttttgagggtatctatattgttcttcccgcgaaaccgttcggcccctatgaagagggcggtaacgaagaggagtagcctcgctttacgcttatctatcggcctggtgttttaacccgccaggcgatatctctcatcgcgctgcctgccgccgggctgatgccgcccagctgaaagaagccgtgaatcaccccgagataacgctgacaggtgcagtcaacgccctgttcaagcaggcgctggtaaagcgcttcgccttcatcacgcagagggtcgtattccgcagtcagaatatgcaccggcggtaagccgtgaaagtctttacgccacagcgggctggcttccggatggtggagcgccgtcgcggcaaggtacatttcatagccgctgagcagggtatcttcggtgatgatgtaatctttaccgttatcgatatagctcttcatgctggcggtggcgtccagcatcgggtaaatcaaaaccagctgcgcgggttgccaggcctgcgccgttttgagccgcagggcggtcactaatgccaggtgtccaccggcgctgtcgccagccagcgtaatgcgggaagcgtcgatgcctaactgctccgcgcggcggtgaataatcagcgcgcctctctccgcatcgttatgggcggcagggaaagtatgctccggcgccagccggtattgcacggcgataacgcggcagccgctgtggtatgccagctggcggagctgatggtcatgcgtggcgaaaccgccgctgataaagcagccaccgtggaaatagataatggcaggcagtgcgccggaagcgttaaggggagagacaacgcgaaatgccatgccgtcgagctcgatatcttctacctgaacgcgcttttcctgttccccagccagtaccgtactggcgagatagccgcatctccggtcatcaatattctgttcgcgcgatgaggggcggcccgcattgataaattcccgcaccagctctgcgatacccttttcaagcgccattttttattcccttaagctgtttggatatacagtgttatagcctgattgtgagcaaaagaaaaccagggattttcgtcgggaagtgattctggaaagcggctcgcaaaaccaaagattttgccggcataccggggtgtttacgccattatcaatggtaagccgggcagcagcaggcgccgcccgacatgatgcctgccgttattccccttcgccagggaacaggaacggattgatggagctgcgggcgaagccctcttgttccatccgtgcgtccagtaccagcgaggcgaggtcgtcggctacggcctccacttttgggtctttttcctgatagagaatcttcaggtaggtaccgcagtcgccgcaggtttcggctttaatcgccgactgctcgttatccagtgaccagtagtgcagatcgcgcgtttgttcgcagttgctgcacttcacgcgcaccacgtgccattcagtttcgcacaggttgcagtgcagatagcgcaggccctgtgtggtaccaatttgcaccatgctggagaccggcatcgagccgcaaaccgggcagaactgacgctgttcaccatattcagcgcgggcctttccggggatcaggctggccatctgcgcccaatagagcgaaagcgcggcccagataaacggcgctttatcgctgctgacagaggcaaaatcggacgcaaacagcgcgcttgccatcagttccagctcctgctcggaggctttttccagattctcgatgaccgccagcgccgggccgctcatctccggcttcagttcggcaatcagagaatgcagcagcttgtgccagtgcttatcgcgcggcaaaacgtggatatccagcggcggtttaccctggtcgttcgcttctttgatgcgcgcggtgagatccatctgcagcggatggtcgtacagcaccacttcctgcgcgtgggcgataagcgcggcaaagcgcaggtaatcacccagcgggttattttcagccagttcgcgcaggcgttcggcgcgacggttatataaatttttgagccggggaaacaacaacggcgggatcatatccgtcgcgcgtttctcgctcttttccagctcatcttgcgggatgatacgaatgctcattcagtcacttcctggtttcagcagattcggcgatggtcgcgtccgctctgcgatttggcgggcatcatgcgcccgctctggtgatgtcattaatgataaccgcaatcggcatacgggatatagccacgacatcgcaatgtgtgcgctacgatacctgatatcgatacccccgactatgcaccgttaggattagctgccctgcgccatggcttgagcgaaacgggaaacgtgccgctcacgcctgcggcgcactctggctaacgttgtcaaaacagcgcgttatccgcaaaaaaatggcgtcgatatacgacgccatttcagagacgaacaacgcgctcgggcctacgactggcgcttatcctgcttttcgcggacttcacgataccagcgcgggtgatgtttcttcgcccaggtcttcgtgacccagccttccaccattgcggtaatggtgcccttcacccacagcgcagcgtaaatatgcaccatgatcactacaatcagcgccaccgcagagaaggagtgcagcatcagcgcgaagcggataaccgggatggagaaggccggcgcaaagtacggacgccagatgatcacgccgctcaccagcagcagcaccagcaagataatcgccgcccagaacacgcatttctggccgaagttatagcgcccggtgtcgcccacttcctcgttgacgacaatcttgcgaatatttttcgcccagaaaatatcgtcccggttgatcaggttgtggtgccagtagcggaagaacatgatgatgaacgaagcaaacataatcacgcccacgaacgggtgcagaatacgcgccagctgcggggtgcccatgatttgcatcagccagttgaaggacgggaagaaaaagcccagcccgctcaccgccgccagcacgaagcagaaggcggtgacccagtggttgattcgctccggcgcggtgtagcgcacgatggtgtcacgtcttttcatttgcgcacctcgtctttctcttcatccagattgtcctcttcctcttccgcgcggttcgggccgacgccgacgtagtggaagatgctggcggcgaaggtggccgcaaagccgaccgccgcgagaggcttccagatccctttccagaacttaaccgtggcgctgatttccgggttctccggcaggccgtggtacagattcggtttgtcggcgtggtgcagcacgtacatcacgtgcgtgccgccaacgcctgccggatcgtacaggcccgcgttgtcgtaaccgcgggttttcagctcggcgacgcgctcgcccgccagcgttttcatatcctctttggagccaaagtggatagcgccggtcgggcaggttttcacgcacgccggctcctggccaacgttaacgcggtccacgcacagcgtacatttgtagacgcggttatcttccgggttcaggcgcggcacgttgaacgggcagccggcgatgcagtagccgcagccgatgcactgctcggactggaagtcgacgatgccgttggcgtactgaatgattgccccttccgccgggcaggccttcaggcagcccgggtcggcgcagtgcatacagccatccttacggatgagccactccagtttgtcgttctgctccacttccgagaagcgcatcacggtccaggatttggcggtcagatcggcggggttatcgtacaccccgacgttgtgaccgacttcatcccggatgtcgttccactcggaacaggccacctggcaggctttacagccgatacaggtggtgacgtcgataagcttcgccacctcttcctgatggtcccgcgcgcggggcgcgggggtgaagccgttagtcgcggaacgacggataatgtcttgcgattgataagccataattcgtctccgttacgccttttccacgttcacgaggaaagccttgaactccggcgtctgcgtgttcgcatcaccgacaaacggcgtcagggtattggcgataaaccctttcttcgccacgccttcgtagccccagtgaatcggaataccgatagtatcgatatccttaccgtccgctttcagcgtgcgaatacgcttggtcaccaccgccttggctttgatatagccgcggttagaggagaccttcacggtatcgccatgggcgatgccgagcttgttcgccagcttctcgccgatctccacgaactgttccggctgcgcgatggcgttaagcagcgcgtgcttggtccagtagtggaagtgctcggtcaggcggtaagtggtaccgacgtaagggaatttctccgctttgcccatctgctcaaggtcgcctttaaagacgcgagcggccgggttagagaccacgttcgggtgcagcgggttggtgcccagcggcgtttcaaacggctcgtagtgttctgggaacggcccttccgccatcttatcgatagcgaacagacgccccatcccttccggctgcatgataaacggcccgacatcgctgtccggcgccgcggcgctgtagtctggaatatccacgccgccccacttcgcgccgtcccatttcaggagctggcgcttcggatcccacggtttaccctgcgggtccgcggaggcgcggttatacagaatgcggcggttaagcggccacgcccatgcccagcccagcgtattgccgaggcccgatggatcggcgttatcgcgacgcgccatctggttgccgtcaggcgtccagctaccggcgaagatccagcagccgctggaagttgtgccgtcgtcacgcagctgcgcaaacgagctgagctgctggcctttcttgacgatcaccgccccagttgccgggtcggtaatatctgccagcgccttgccgttgctctccatcgctacttcttccgacgctggttcatgcggcgtggcgtagttccacgtcatgttcagcaccggttccggcgccggtccgccctgttcggcgtacatcttgcgcaggcgtaagaagataccggcgaggatctcaccgtcggtggtcgcaatccccggggcgtccgcgcctttccagtgccactgcagccagcggccggagttaacgatagaaccgttctcttcggcgaagcaggtggacggcaggcggaacacttcggtctggattttcgccggatcgacgtcgttcgactccccgtgattttgccagaaggtggaggtttcggtgttgagcgggtcgatggtcaccaggaacttaagcttcgacagcgacgcgacaaccttgtttttgttcgggaacgacgctaccgggttgaagccctggcagatatagccgttcactttgccctggttcatcatctcgaaatattgcaggacgtcgtagcccttatcccacttcggtagccagtcaaagccccagctgttttccgccgtggctttatcgccaaagaaggccttcatcatagagacgaagaatttcgggtaattaccccagtagttcacctggtccttcaacagcggtttcggcgtgttggcggcgagataggtttgcaggtcagtctgtttctcgctcggcagcgtcatatagccaggcaggctctgcgacagcagccccaggtcggtaagaccctgaatattggagtggccgcgcagggcgtttacgccgccgcccgccatgcccatattgccgagcagcagctggatcatcgccatggtgcggatgttctgcgcgccgatggagtgctgcgtccagcccagcgcgtagaggaacgaggcggttttatcgtgcgcgctggtttccgcgatgtactcgcagactttgaggaagtcggcttttggcgttccgcagatgttttcgacaacttccggcgtatagcgggaaacgtgctgcttcagcaggttccagacgcagcgcggatgctgcagcgtggtatcgcgtttggcaaagccgttctcatccagctcatagttccaggacgttttatcgtacttgcgtgcttcggcgtcgtagccgctgaacagaccgtcttcaaagctgtaatcctcacgcacgatcaggctggcgttggtgtaagcctcggtatattcacggttaattttttcgttgttcaacaggtacaggatgacgcctgacaggaaggtaatgtcagtaccggaacgaattggggtatagaaatcagctaccgccgcggtacgcgtaaagcgcggatcgatcacaatcagcttcgcgccgttgcgaatcttggcttccatcgcccagcggaatccaaccgggtgagcttcagcggcgttgccgcccatcaccacgacgagattggcgttcttgatgtcgacccagtggttggtcatcgcaccgcgaccaaatgttggagcaagacttgctaccgttggtccgtgtcagacgcgcgcctggttgtcgaccgcgagcataccgagcgcgcgggtaaatttctgggttaaataaccggtttcgttactggaggcggaggcgcacagcataccggtggtcagccagcggttgacggtggtgccttcgctattctgcgcgacaaagttggcgtcgcggtcctctttcatcagcttagcgatgcgatcgaacgcttcatcccagctgattttctgccatttatcagagcctggcgcacggtattccggaaatttcaggcgactttcggaatggataaagtccaccagaccggcccctttagggcagagcgcgccacggttgaccggatggtccgggtcaccttcgatatggaagatagacgctttggcattttttgcgccgtcgccgaggctgtacattaacagcccgcagccaacggaacagtaagtgcaggtgttacgggtttcgcgggtgcgcagcagcttgtactgccgtgtttccgcgagcgctaaaccgggcgcaaagcccagcgccgctgccgtggttcctgccataccgccagcgcagatcttaaagaactgccttctgctgacctgcatggttcgctccttgtttcgacattgtcacgtatagttatttgctttgcggtaagggccgcaaaggttcagaattgggggtaatttccctcgttcccgaagggatataaacagaataccacattgtgtgtatgcctgttccaatacggttaagacaaagtgaacaagaagcctcttgaacaaatcgaaaatgtgacagatatcacaggttatcgccaggtatcgctctggaagcgccaaaatttgcaacatcctcagccagacgagttagctgaagaggtacccgttgcgctggtttataatggcatctcgcacgtggtgatgatggcgacgccgaaagacctgatgcagttcgccgtcggcttttccttatccgaagggattatcgaaaaccggggcgagatttatggtatggacgtcgttcaggcctgtaacggcctggaagtgcaaatcgaactctccagccgccgcttcatggggctgaaagagcgccgtcgcgcgctggccggacgcaccggctgcggcgtatgcggcgttgagcagctcaacgatatcgggaagcccgtgcagccgctgccctttacccagacgttcgatctggcgaatctcgatcgcgcgctggcgcacctgcatgattttcagccgataggccgccttaccggctgtactcacgccgcggcctgggtaagtccttccggcgagctcgcgggcggccatgaagacgtgggtcgccacgtggcgctggacaagctcctgggacaccgcgcggaatcagaaggcgcctggcagaacggcgcggcgctggtctccagccgcgccagctatgaaatggtgcagaaggcggccatgtgcggggtggaaatcctctttgcggtctctgccgcgactacgctggcggttgacgtcgccgggcgctgcaacctgacgctggtgggattctgcaagccgggcagggcgaccgtttacacgcatccgcagcggttaatcgcgggttaaatttaagtcagtttttttgaatgatgacaacaaatccttccgctttttgtttggcgatgtgagggctactatttatcacatcaaggcacggcgccttattcaaacaactaacgtaaagggtttatatcatgaaaagcatcaaaacttttgtcgcagttatcgctctggccgcttcttttggttctttcgctgcggaaaccgtgaccgcgaccgccgcaacgatggacggtgcggaagcgaaaatcgccgctcaggcccaggccgctggcgcttcatcttacaaaattaccgaagcgtttaccggtaaccgcgtgcacatgactgcggaactgaataaataagcgtaaagctactgtcgaaagagcgcccagggggcgctttttttgtgtctgagatttattcccggggggcttaacgcaggtgcctttgccgtgaggggcggcgatatcagaatcaaaacaggctgaatgcagctttacgcgttggtccctgcaagaaggcagacaacagatgagaaagccgtgaaccttcctgacgcaaaaaaatgcgctatttatcacatttctgctttttcatcatcgctgagtttatgggagaaaacaggcagcccacccgcgcaattatcgcttcaagcaacttaatgatcttaaagaaaataaaaagataattgttaagacgatctcattttataaaagagatatgcatcacaaaaaatgaggaaataaacccactgtcaatattaggctcggaggaatttatcagcatattgtgatctctattgcaaataacggtcttgaactcagggaaaaatgtgggcaagcaaagcaacggagacaggcaatgaaaattggcatggttattagcggcggcgatgtttctggaattaataattttatattccagatagccagactggcgagtgccgatatcaccctttttaatggcggaatacccggactgctggataaaaatcatcacgaggtcgcctggcgcgatctggttgatttctccattgcctctattccgatcatcacctccgggcgaaccagccgcaggctgctgcgcagtgaatatgaaaccatagctaaaaaaattaaatcactgcgcattgatgtgctgattatggccggcggcgacggcagcctgcagtttctcaatacgctgagcgaatttgatattaactgctttggcgtcgggatgactatcgataatgatgtgtacggcagcgattataccattggtttttccaccgcctgcgagcagattattaaggaagtttcccggttaagaaataccggaagagcattaccgggccgcgtctttatggtcgaaatattaggaggctattgtggagagttaacgctgcaatccgcgattaaatcgaatgctgatatcgccctgattccggaatcgcagatgccgttagaaacgctggccgagcgggtgaagcataagctgacacagcagaacagcgtggtgatcctgtgctctgaaggctacaccagggagtattctcccggctttcagggggccattgataccatgattaagcagcttgaaccgcaaattggcgtgcgtattcgtaaaaccatcgtaggctacggtttgcgcaatggcgatccgacctgcgaagaaatttaccagggcacgattatggccagtgaagtggttcgctgtattcagtcagggatgaaaaataaagccatcataattaattcaagcaacaaacctattccgattgatttagttagtatgaaaaaacgtctggtcgacactgaaggacatcattataaacttgccaaacaactcaatattatttgaggagaccctacatgctgaaaattctatgcgtatgtggctgcggcctcggttcaagctttgccattgaaatgacggcgaaggcggttttaaagaagctggagattcccgcacagattgaacataccactatttccgaagccggggcgtttaaatcagatatgattctgacgcaaaaaaccttcgccgatatattaacggcggatgccagcgcggaggaaattaaacgcgtggtggtactgcataagctcacggataaagatgagattgaagctaagatcgtcgcattcttaaaagagcgtaacctgaaggtagcggactatgaatagctttgtagagtttatcgttaaagatttactcggccaggcttcaatattaattgcatttattgcgatgctgggcctcattctgcaaaaaaaatcagcgggcaaaacggcggaggggacgtttaaaacgctgctcggtttcttaattatgatggccggcatcaacattattgtcgccacgctaacgttccttaacgatatcttcacgcagggattcggcatgaaaggctacattaccgatgtcgccgccatcgccggattagccaaccgtgaattaggttccgaagtcgcgctgaccctgatggtgatttttgccgtcaacatcattatcgcccgcctgacgccgctgaaatatatctttctgaccggccaggcgctgctgtggatggcgaccatcggcgcggtgattggctataaagccgggctgaccggactgccgttgattttaaccggcggtattttcggcggcgtgatggcggtactgatgcccgccctggcgcagccggtcgtcaggcgcatcaccggttccgatgacgtggcgctggggcatttctgcactatcggctatctggtgcaggcggcggtggctaaagtggtgggtaaaggttcccgctcaacggaagatcttgaattaccggataactttaagttcctccaggacacctatctcgcgatggcggtggtgatggtgccgatgtatctcattcccgcggttgcggcgggcccggaatatatcgctcagttctccaacggcattaactacctgatgtacgcctttatgcagtccattcagtttgtggcgggagtattcgttctctacagcggcgtgcgcctgttgctcaacgagctggtgccggcatttcgcgggattgcgatgcgcattgtcccggacgctaagcctgcgctcgattgcccggtgctgttcccgtatgcgcccaatgcggtgatcgtcggcttcctggcgacgaccgtcggctccatcatcggcatgctggtgttcccgatgtttggcctggcgatgatcctgcccggtctgttaaccaacttttttgccggcggtacggcgggcgtcttcggtaacgcgctgggcggccgccgcggggcgatgattggcggcgtcattcacggcctgtttatcaccttcctgcccgccattttggtaccgatgctggaaagctacggttttaccggcgtcaccttcagcgattcggacgtgattagttccggtctggtattaggccacgccttccagaacaactggctttttgtcgccttgttcattgtttttgttgccgcactggcatggttcgtaaacggtaaatcagcgaagccgaaaggggaaaatgttcatgagtctgtataacttcaacgctattctgaaaattgcgcaggaaagagattttaaagccattggctcatttaatttgcactgtattgaaatgctgcccgccttttttaaagcggcgcaacaaagcgatagcccattaatgattcaaatctctaccgggacggcggaatatctcggctatcgtttactggtggatgcggttcgttcattagcggaaagtgaaaacgtgccgacctgcctgcacctggatcactgctctgatatcagcgccattgaaacggccatggatgccggattttcatcggtgatgtacgacggctcccatctggatctggaagagaatattggcaatacccgcatcgtggtggaaatggcgcgcccgcggaatatcacggtagaaggcgagctgggggcgatcggcggatcggaagatggcaaagccgtggccgcggaggatatctgcttcaccacggtggaggacgccaaacgctttgtggaggagacgcaggtggatatgctggcggtctccgtgggcacggtgcacggcctgtataccggtaaggcgcaaattcagcaccagcggctgaaagagattagcgccgcgaccggcgtgccgttagtgctgcacggcggcaccggcgtcagcgatgaagatatgcgcctggccgtcactgaaggtatcaacaaggtgaacgtcggcactgaaatgaatgtgcagtgggtcgatcaatgtaaaagcacgtttgaaaaaggcaaagtgaacgacagcgtgcgcaaatttttaattccggcgaataacgcggtcacccatgtattaatggaaaaaatcgctctgtttaaataaacgcatatttttaaaccgtattccgttgccctgctgtccgtcggggaggagctcgctatgtttgaatctttgaaaacgctgtggaaaaaagagaatcaacccccgcaggattatgacgaacagtctcgccagctggcgggggaaattgccaggctggaaggcgagttacggggcaacccggctaatggcgaagtgcagaaagcattaatgctgatatataaccgggcgctgtcggtctatgccaaaagtcatacgcatcgcgaggaaatcgatgcgctttttatgcgcattgatgagttacgtaacattattcgccataatatataggaagtgataatgacgataaaagaactgctgattgaggccgatgctattcaggtcggcgtcacggagtccgactggcagaaggtgatccagctggcggccagcccgctggttgcaaaaggctatatctcggcagattacggccaggcggtgatcgataataccctgcatcatggcgcctattacgtgtttgatgaaggtgtcgccatccctcacgccaggccggaatgtggcgtcaaacgcaactgcttcagccttgtggtgttgaataagccgattcaatttgccgatagcgagaaggcggatatcgtcattatgttcggcgcgcaggacagcaatgcccatattgaagaggggattcgggcgattgtcgctctgcttgataataacgagaccatggcgaagctgcgggccgccagcagcagagaggaggtcgtcgcgttgttatgaacagacatctcacacccggctgcaaaacggtgattttaattaacggcattcccgcatcgggtaaaagcaccgtcacccggcagctatcggcagcgtttaatctgccgcacctgaccatagacggtattaaagagccgtttatggcgtgctttaccgggatcgaccggaccttcaaccggcagctgggctgcgccgcgtatgaagtcatctggtcgatcgtcggccagtcgccggcaggctgtatctggctcattgacgcctggtttggctttcaaccgcgcgacacgctacagcagctgctgcaacgcgcgggcgtagagaaagtgctggaggtctggaaccacatctcgcctgagcttgcggtgtcgcgctatgccagccggttgcaggatcgtaagccggggcacccgggcgaggagtatcttccggaactggcgcagctggcgcagcaggcggaaccgatgcggctggggccggtgtttaccgtggatcagcacaagccgctggatatggtgtccgctacccgttggattgaagcacaaatagcgtaagcccttaagggcagctgcccggcggcgcttcgctggcacggcctacaattgcataacaatatgatgtttcgcgtttcgtaggccggatcaggcgacgcccgccatccgcagcagcgccgtcgccacggcggcggcgataatcaccacgatcagcggcattttacgccaggcgaggaacaccgccaggcccacgcccagcacccgcgccatcccggcaaaatgttcgccttcgtaaaaggtggtcgccagcgccacggaaaagagcagcaccgtcgccgcatcggagagcagggcctgggcgcgctcggaaaacgccagccggctgccgagcttcgccccgcctaaacgcattaagtaggtgcccagcgacagaatcgcaataccggcgataaatagcgtcatattgcccattattttttcctcgtcagcaggccaaacagcgacagcaaaaccggcaggccaaccggtgcgaaaggaacggcggccagcgacagggccgctccgctgcaggcgcggatcagggtggtgcggtttttaaaggccggcaccaccagcgccagcagaatcgccgggaataccgcatcgaggccaatggtttccggggccgggagcagtttgccgacccccgcgcccaggagcgcccccaacggccagatcagcgccacgcccaggccgcacagccagtaggcggcccgccgctgctcgggggttttctgcgacagaccaaacaccacgctttcatcgttcataatatggcagccgaggaagctggcggcgcgctggccgaccaggtcgcgaaccgtcacgccgaagggaatatgccgcgcgttgaccagcaaaccggccgccgctgccgccagcgggttgccgccgctggcgacaatgccgataaacataaactctgaggctcccgccaggacgcaaaccgaaagcacaaaggggacccaaatcgggaagccgtaggcgacggccagcgaaccgtaggacatcccgacgatgcctaccgcgaggcagactaaaacaattgctctgagggtgtcgcctttaagcgtggcgaagtgttgtttcatactctttagccatatcgaacgaatttccattataatgaacgcaacagaatcgcatttcaagacgaacgaaacgttcgttataaaaaacacggagggctgtatgactcagccaattagcctgattgccaaaagcctggtgcgggaacgcgcgcgcaccggtctttcccttgccgaagttgcgcgacgggcgggaatcgccaaatcaacgttatcgcagctggagtccggcaacggtaacccgagcctggaaaccctctgggcgctgtgcgtggccctcgatattccctttgcccggctgctggagccgcaggtgaataccacccaggtgatccgccgcggcgagggaacgaaagtgatcgccgagcaggcaaactatcaggcgattttactggccgcctgcccgccgggcgcgcggcgcgatatctatctcctgctgacccagccgggcgcggaccgcatttcccaccctcatccgccgggttcggtggagcatattattgtcacccagggacgcgcgcgcgtcggcctgacggaagcgccggaagagctgggggagggagattacatctgctatcccgccgatcgggagcacgttttccaggcgctggagccggatacccaggcgctgctggtcgccgagcagaactagtcaggcccgacactgggccttcggtgtgccaaaaacaggcgtcagataaaagggattgtcaggcgcgcgcgttatgattgatatcgccatcggccgttttttgcagggcaatagcgatagggcaggagaggtcgagctgccggggatgatagccgcgctgcagcagccagaaccactcgcctccggccgctggctccagccccatatcggtaaaacctgctcgccgcagcctgggtcgtagcgacatcagcgcgccatccacgcgcgcccggatataaatcagtttacgggccggcaggcgggaaatctcgtcgaccatctgttgcgttgatatattcatcgtgacgtccacccgatcatcacaaatggcaatttcaacgggggctgcacaagtttccctggcgggcgggatctgcgccgcgccaaatttttcctttagcaagtttatccaaccatcatcacggctatcatccgcggtgagcgggacggggcgtggctgcaagggtaatacgccgaggataatgctttcacgcaggccggattgaaagggggaggggacgtaatctctgagcaaccccgttgagtaaaagcccagcctctgcgccaggcgctgcgagtgtggatggctggataccattttgatggttagcgtgcccaggccaagcctgcttgcggcaagacgcaaatattcccccagttgggtggctacgccccggtttctgaaggcggggtgcaccgcgaacatggccagttcggccgtctgcttatccgcgtggtgccgccataaggcggcatgcccgatgatgatgccattctgttcggctatcgcgctgtgccattcgtcccgggcgttgcgccagccaatcaggctgggcatatagatatcaggatagacatagcgatcgccgtaaaccgtgcgaaataaggcgctgataccttcgccgtcttgtcgctggaacactctgatttcaatcatttcaccgcctcctgcgcgaggtaggcgcgtttgtcgatcacccgctgcagcttacctgttcgggtattgcggataagttccgcctggctgcaccagtgaacctgaacgcacagctggccggcagcctgtagttctgcgagagcgtgatccctggcgagtaattgaccgcagagcctgtcggcctgctgccgggtaccggaaaaggcgatacgtaagctcaaacgatcccggttatcggcgtgctccagcatcagctgccactgctgatgccccatctcttccgtaataagggccgctatttcatcaggaaacagcgaggcgtaacctacccgcaagcggtacccgaggctactgcgtccctgcaaaataaacttgcgatgtttgcttcccggaggttcacgccaggcggccaaatcgcctaccggatagcgaatcagcggcatcagcgtgcgcgtaaggctggtgaccaccagcattccggaacgattgatttcgtcgatcggctcgcccgtcgcttcatcaataatttccacgatagtttcgggttcaaagacccgatgctcgtccgccaggcaatccggcgtgctgagtccgataagcccggcatccacgcaggcgcagccgatagaagcaatacgggcgttgggaaaggcggatttcagcagctgtagctgttcagtaaaaagactctcgctgccgtaaaggatggtctcgataccgggcagacggcggttttttccagcgagctctgccgcatattgcagcagcatcgccgggacgcccaccagtacgttgatatcgtgctggacgatctgttcggtgagggtctgcggttcaagcgatccggtgaaagggtactcacataccggtatcgacatgtgcgaaagcgcgccgtggataaataagaagctcgcgtacaaatcaccggcgaaaaataaatttgccacgcgcgcgcctggcttgagctggctggagaggctgcggccaaaactggtgacgaacgcacgccactcctggcgggaaaaaaccgacagcttgccgccgccggtggtaccgccggtcttaaagacaataccgtcctccaccggcccggtgaggacgggccagtttttcaggccctggctcccctcccagtagcgttcgggattaataagcggcaggtccttcagctgccagccgcgggtggcgagatggcgatagtgttcggcatagaaaggcgagcggcagcgaaccctctcgacaagctgttcgagacccggtgggcttacggccacttcttccgtttgggtggattgcggatcaaggcgacccatcatctttgctgttgtcatattcaaatatccttattgtgagccgatcggcgggagtgcgctcaacggcgtttatcaatgaccagcggcgtcttgccgctttgcggatgccgttcaaattcgctgaacgggcggctggtcacggctaactccagcaaatgggcgtccaatgccattttgagctcagggtcggtgcagacccgctgtttgacggtatcaatattgccgtcggtgaagatgttgatgcattcgagcccgctgcgcgggttatgttgaagaatcaattgaacaggggcagcggcgagcgttgccagccgctggggctgaataaacatcgtgccgatacgcaccaggctgccgtggcgacctaaaagttcaaagcgggggctgggggcgccgcaggggcattcgcccggcagccaacggcccatatcgccgatgtcataacgaataaccttctgaccttcgcgggccgtcgaggtaaagagcaggcggccggcatcgccgggcgcgacgggccgatcgtcgagcgggtcgacaatctccagccattgaatatccgtcatcaggtgaaacacgccatccgggcaatgcgtacaggcatgtcccagcggcccggcatcaaccgaaccatacagcgccgagcgaatggttttcaccccgaaaccatgaatatagtcacgctgggcgacgcccatatgttcgccgcccagcagcagtttctgaataccgccgtagtcgcgcagaatggcctcttctcgcgtaaagagctgatacagcgtgcttggcataccaatgagcgtggtaacgccctgattcacaatagttcgggcgatctcgtgatagtcatcatcatgggggccgcccatgggaagatgggtcacttcaagcatttccagtagggtgaagaagctgagtaaaccaccgtagagattgcccgcgtacatcagattgagcactttgtcgtgggcgggatccagcccggcggcgaacatgcctgcggcggcggcctgcatctggcggcgatagtcgcgataggtaaacccggcgagtttaggcacgccgctgctgccgccgctgcgaaagaaaagctgggcgctgggccgcatcgcgtgctgtaagaatgccgttttatccataatcggctgctgcgccgtcagcatcggcggcggcgggttcggatcgagcgtggcctgctgcggcaggacatcggcatccagcgtcacggtgacgcgacgagccagctggcttaaggcgtaaacgccgtcatgcggttcgccgtgatagccgtcatgcattttaccgacgggggtaattcgattgacgccggctgccagcagcagttggctgagggggattctgtcccgatcggcgacaaccagcccgcaggtttgcaggtgggttcgccaggggcgcagcgtttgcatcactttattttgcggtagcggccgcagcaggacggttcggaacagcggtgaaggcgttatggccgaggtgtgttgctgaatgatgcgccagccgtctcctgccagcagagcgttgtcagccccggcaaatacggcgtccagctgcgcgaaggcgacggcgcgggtgatatccgccgccgccttttcatcgggcattaacggttgccaccgtgcgtgacggcgccgcatggcctctgccagtcttccgccaatatcctgcaataccgccgaatcatcgctatcaacaaaaacgatttgcgggctggaacaggcctgctggtcaaaacagcaaacgtcatccgccagcgcgagaaggctttcttcattaacggcatccggttgtagccaggcaaagctgattttatgtccccaggggatccagcgacacccgccagggagctgttgacgaatcgcctcgagggcggtatcgccaccccaggccgatataccatcggcgtgggtaagcagcagggaaaggcgcgtggtttcgacgggaaccacggcgacgaagttagccagctggtcagttaaatcgcagcggataaacgcccgtagcagatcgattgtcattccttgttcgctggcgcttgggcgcagccagttaatattcccgaccagcaggctctctattattgcgaagaagggaagcagttccgcattggctggggtgacatgcaccacgacgcccaaaggacgccagccttcaaactgcggttcacggtagttaatgcggcgcacggaaaaggggttatcccccagctcatgctcgagcttttggcgcagcgcgtcaggttggcaaaactttctcacctcttcccgataagccgggcccagttggggaaggaaagcgtggtcttttagctgttcgataaaacgcccggcgcaggcaagcacggtttccggacgcggcggttggcccagcgcgctatccagcccgctcgtcaacatggcgatggcctcttctggcgtgagcgaggaatagttttttccctgaatgaaatacatattaatttcccttaatcagttctgacgccgccagtgcgcagctacgtgctttgctatggctggcccggcccagcagctcaaaccaatcggttgccacaccgcatccgcactcttcggcgcggtgcaattgtgctagatcgctcatgaccacgctgtgcgcagggcaggaggtgatataaggcgacacaaactgtataaaaccgcgctgcccataatctttcaccgccagagaggcggtatcgcggatccaggcgcgggaataaacgggaatatggaaatggtgatgcgcgcattcaatgtagggcacgcagtgctccacggaaccatagccgtcgcggcatcggctatcggggatcccgagctgttgggtcagccgcgcatagaacgcggatttagggatttcacggtcggcatgcgttttccagccgccgccgaaaaaggccagcgattgatgatgaagctggagcggcggtagctgcatttctcgcatccgttcaagtatgaaccacataaatgccgggaaacccaggattcgtaccggtaacccctcttcagcaaactcctgtaaagcgcgaatcacgccgaaagggtcgaactcatgcccgctcccggtgtgacgcagcgcgtaaacggcgcgtttgaccggcgcgtatttacacaagaactggtcggtaaaagaggtgccaagcgtgatgatatcggcgggttcgtagctgaggagcaggtagttgcagggcgcatcgggcgtttcccagccataatggcggaaaatgcgatcgaccattccctgggcggctccgatactgcgcgcatcatagcgcattcgacttttctgcccgctggtaccggaagaggtgagttcaagcgcatcctcaccggagcggccgatcggcagattctgtttgaagtagtcggcaaagatcggcggcagctgcgaccacgagtctatattggccgcatctgccggaatattgtggcgggccagccactggcggtagcccggcgtattcataacatgaaatgcaacgatttcacgcatggcttcatcaaagagccgttgtgaatcgctatcttcatgataagggctgtcgagtgcgcagagggcatcgacgcaggataaagtgtccattttattaatccttaataaaaagtcgtccgtgagtgattaatggcctgaagctgttattttcgttttactcctcttctgccgggtgaatatattaacgataatgaataatgctgccagcatcggaatagtggccgcgataatatatgcgctgaggctgtcgccggcgcccaatccggccattagcgcccccccgaggctaaaaatagcgacggaaatcatgcctatcattgccgatactgaaccttttccatgctcgctggaaaatagcgtgaggcgatacagcgtggcgttgcaaatgcccaggccaaaagcataaatagccatgccgataatcagcgcaataatattttgccatattagcgtcatgaccagcgccagcattatgccgataaatacgggagacagtgaaaagtataataactgctccggcttaaatttttcagcggtaacgttaaggacgatattccccgcaatcaacgcaccaaaaataggtaattgccatagcgcgtactccagcatgctcatttttagatgatgcaccagcagcagcggggagagcgcgatccacgccatcagcggcagcccgacgaggccaagcgcaacgctgccggatatacagcgtgggttcgtaagcaaatcgccataagcgcgcgcgagggtttttacctcgagcggctgacattcaattttactgccatcctggcgtacgacgccgatcgtctccggcatccagcgtagcaaaccgaaccaggtgagcgccgccatcagcgcgatagcaataaaaagcgtgcgccatgacaggtatgcaagcacaacgctaccgaccaaagggccaaacagcggcgacagcagcgcgatattggcaaacagggcaattaagcggatcgcatccgattcgttgaatgcttcctgcagggccggatagctcaccaccaccacaaaccccaaacctattccctgaataaaccgcaggagagtaaaaacctggatattgtctacccatggcgtggccaggcaggaaacagaaaaaagcgcacagccgatgagtaataaaggcctgcggccaaatctatccgacgccggtccaataagccactgaaagctgacgccgccaagtaaataggcattaagtgaccacggtacgtaatgcggttgagcatttaagtctttaataaccgttagcattcccggcattactacatcgctggcgacataagttaacagctcgaatgttgaaagaaataaacagaaaaataaagcgtgccgtgaagaaacaggcagtagtgagttatacataaaaccctgttattaacatattccattatttagcttttatatcactccctctttttaaaaacttttatcaagtgattcttagttgataaatatcaatgaacagaccgtgttcatgtttgttttaactgcgaattataattccgatacatacttcatattttaattaaaaataaatcgaatgatttatggggattaaatgtacgttttccagacgctgcgttatttttccagggttgagcgattaactcattcatctatcaaccatatgatttgtatagggtaaacctgtcggattcaaatatattcagcttggtgaattacagcgcatcttcgtctctttcttatggggaagggggcgtttaatttaccgccacattgaataaacggtcttgctgcctctcatttcgttgtgacgtatcatcaggcgccgagggccgcggtgttcaggtattgccgcgcggcgtcgctcttgctggacgccatgcccgtattgcgggacactagccgcattctcccgcgaagacagggatacttatgtcgctgaaagccattgctaaagaacttgggatctcggtaacgaccgtcagccgtgcgctaaacggctatgatgacgtgtcgcaggagacgcgcgcccgcgtggaggccgaagctcagcgccgtggatatcggccaaatactttcgcccgccgcctgaaaatgggcaaaatcgacgccgttggcctcgttttccccgtgcgtcccgcgccgttgaataacaacgtctttctcgaaatggtgggagaaatcagtcacgagctggcgcgctatgagattgatttactgctgattgccgacgatgaacaggccgataagcacggctatatgcgtatggtgcagagtcgtcgcgtcgatgcgctgatcgtggcccatactctggacgacgacccgcgcctgattcagctgctctcttccggctttccttttctcgccctggggcgcagccgcctgccgcagccctacgcctggtttgatttcgataaccaggcgggaacgtaccgcgccacccgtcatctgattagccaggggcatcagcgcatcgcgctgctgagcgaaaataacaatcaggcgtttattacccagcgccgcaacggttacctgcaggcgctgcgcgaagcgggcctggcggaaacctggctgcgcagcgtaccgcccacccgccgcggcgggtttcaggcaacgatggaactgctgcgcttgcctgaaccgccaacggcgattgtcaccgattgcaacacccacggcgacggcgcggcgatggctctggctcagctcggacgcctcaccggcgccgatcgcgtctcgctggtggtttacgacggcttgccgcaggacagcatcatcgaaaccccggtgggcgcggtggttcagtccacccggcagggcgtgggccgccagattgccaccatggtccgccgcttaatcgccggcgaggatctggcctctctccaggtgctctggcagcctgaatttattcctggcgaaaccgcctgattcccttcccgtcagattaatttcctgaactcgatcacggatccgaaacgttttggttggaacccgaaacgtttcggatcaacagtaaggcattccttgttgtggagatgtctcatgtctgattcgattttacgtctgcaaagcgcagcggctgatgtggtgatcaaaacccgtccgttcgccgaaattatctactgggggccgcatttaagccactttacgccgcaggatgcggccagcatcgcccgcccggtggccaatggccgcctcgacgtcgattccccggtgaccttaatggccgaactgggccacggcctgtttggtgcgccgggcattgaaggccaccgccaggggctggatgcctcaccgatgtttaccacgaccgaggtggtgcaggatgggcagaatttaacccttctcagcgaagacgcgcaggcgggcctgcggctgtgcagtgaaattcagcttgatagcagcggcgtgctcagcgttcgtcatggtttaaccaacctgcgcccgcagccgtggcaggtggaccgcctggcggtcacgctgccggtcgccgagcgcgcccgcgaagtcatggcctttcatggccgctggatccgcgaatttcagccccatcgtctgacccttgaacacgacagctttgtgctggaaaaccgtcgtggacgcacttctcacgaacattttccggcgctgattaccggcagccgcgcttttagcgagatgcagggcgaagtgtggggcgtgcatctgggctggagcggtaaccaccgcctgcgggcggaagtgaaaaccgacggtcgccgctatctgcaggcggaagcgctctatctggcgggagaaatggcgctggcggaaggggaaacgctgtggacgccgaacctctacgccagctattcggcgcaggggctgaacggcatgagccagcagttccaccgctatctgcgcgaacagattattcgcttcccggacaacaaaccgcgtccggtgcatctcaatacctgggaagggatctatttcgaccacgacccgcagtacatcatgcgcatggcggatgaggcggcggagctgggcgtggagcgctttatcattgatgacggctggtttaaagggcgcaacgacgactgggcggcgctcggcgactggtatcttgatgagaaaaaatatcctgacggtctgacgccggttatcgaccacgtgaagtcgctggggatggagttcggcatttgggttgagccagagatgatcaacccgaactccgatctctaccgcgcccatcccgactggctgctggcgctgccgggctatacgccgatccccgggcgtcatcagtttgtcctgaacctgaatatccccgaagcctttgattatctgctggaacggatgagctggctgctgggcgagcacgcggtggactatgtgaagtgggatatgaatcgcgagctggtgcagcctgcccataacggcaaagccgccgccgatgcgcaaactcgtcagttctatcgcctgctggatacgctggtggcccgcttcccgcatattgaatttgaatcctgctcctccggcggcgggcgtatcgattatgaagtgctgaagcgcagccatcgtttctgggcttccgacaataacgatgcccttgagcgcaacaccatccagcgcggcatgagctacttcttcccgccggaagtgatgggcgcgcacattggcaaccgccgctgccacgccaccttccgccagcacagcattgcgtttcgcggcctgacggcgctgttcggtcatatggggcttgagctggacccggtgaccgccgatgagcaggagcgcgcgggctattgcaaatacgcggcgctgcataagcagtggcgcgatgtcattcatcacggcgtgcagtggcgtatcgatatgccggacgccacaaccctcgcgcacggcgtggtgagcgaggatcggcatcgggcgattttcctcgtcagccagctggcgatgccggactacaccctgatggcgccgctgcgcgtggcggggctggaagcgggcgcccgttacgaggtgacgctgctcgaccatcccgatattcagattacgggagagggcggccataccatgcgtaagctgccggaatggatgacgacgccgcagaccgtcagcggtgagtggttgcaacaggcggggctggcgctgccagtcctcgatccggaaagcgccattttgattggcctgcaacgcgtgtgatgacgatgggccgcgcgtcggccctttttgaggaatacaccatgaacccgaccgtctgtacccataaaaacaaccccaatttctggattttcgggctgttcttctttctctactttttcatcatggccacctgttttccgtttttgccgatctggctatcggacgtcatcggcctgaataaaaccgagaccggcattgttttctccagcctgtcgctgtttgccatctgttttcagccgatactgggcgtgatctccgataagctggggctgaaaaagcatctgatgtggattgtgacggtgctgctggtgctgatcgcgccctttttcctctacgtttttgcgccgctgctgaaaaccaatatctggctcggcgcgctgagcggcggggcctacatcggctttgtgttctctgccggcgccggggcaatggaagcctatattgaacgcgtgagccgcaacagcgggtttgagtacggcaaagcgcggacttttggctgcctcggctgggcgctgtgcgccaccacggcggggatgctgttcagcgttaaccccgagtgggtgttctggatggggtcggccgccgcgctggtactggtcgtgctggtggccattgcgaaaccgcaggccagccagaccgcacaggtgatggattctttaggtgcaaatcgcccggcggtggatttaaaaactgccgtgggcatgttccgccagcgcaaaatgtggatgtttattctgtacgtcatcggcgtcgcctgcgtctatgacgttttcgatcagcagttcgccaccttctttaaatccttctttgctaccccggaatcgggcacccgcgccttcggttttgcgaccaccgccggggaaatatgcaacgcgattattatgttcagctcgccgtggattattaaccgcatcggcgcgaagaataccctgctgattgccggcatggtgatggcggcacggatgatcgggtcatcgttcgccacgacggccgctgaagtggtggcgctgaaaatgctccatgcgctggaagtcccgttcctgctggtaggcgcgtttaaatatattaccggcgtgtttgacgttcgcctgtcggcgacgatttacctggttggcttccagttttccaaacaggtggcggcgatcttcctctccgcatttgccgggaatatgtatgaccgtatcggtttccaggatacctatatgatccttggcggcattgcgctgagcgtcacgctaatctccgcctttaccttatcgggtaaggcaacgtcggaaaagatgagcgatagcgcgatgacggtttagaaaacagtccgataattcacaaggatgtgattgataaatgaggaaatattgaccatggatatgaaggaaagaatgaacagcggcgagctttatcttgattcaggatatgggttaccgcagcagcggctgatgggcaaggcgcgagcttacgaatacaaccactcgcacccctttaatcaggaattaagaaacgacattattcagcggatgttcgccgccgtgggcgagcagtgctggatagagcctccgattcatgtggcctacggcacccacaccaccattggcgataatttttacgcgaacttcaacctgacgctggttgatgatgccgacattatcatcggcaataacgtgatgtttgcgcccaacgtgaccatttccaccgccggccatccgattcatccggatctgcgccatacccagcagcagttctctcagccggtgataattgaagacggcgtctggttgggcaccggggtgattatcaacccaggcgtcaccatcggaaaaaactcggtcattggcgccggcagcgtggtgaaccgttccataccggcgaacgtgatcgccgctggggtcccctgccgggtattaagagcgatcgacgacagcgataaaaagaagtttcagctgtttacagggtaacttgtcatggcgccgggcgggcatcgcgaagtcagggcgcccgcttcatgctccgcgcgggaagatgccgggcaatttgccagcagggacgtgcttccgctgaatctcatgatgcttttgcctgactattcattgcccaggcatttctcgcgttacgctgaatgctaatttttcgtgaaacttagccccttccatcataatcatacaaacgtttgccatcgttattttctcgttttttttattcatttcctcagcctttttcagctgaggaggacaagcgttaatatgctttttcagcggctttttaattatccttttagccattattttttatgataatgtgattttttatagcgtttttatgtggtttttatgtgaataaatttatagttcatgagtagaaaaagtaatggtttttaccttgggtagggtattttatccatgcagaaaatgagagtttttatgctgatatatcagtaggatatgactagtgtaaaaaacgcaaaatgaaattaacctgttgagttataatgatattttaattttttttatttcctcgatttttgatgctagtattttaattaagtaatgtcgtaggctaaatatgagaataaataatgtttattatcgatgatgattttgatcgtggctccttacgttccttttcgtttggccgtaataccaagcccgcgttagcgattcagcgtattttgcaggcgctgctgcccgtgagcacaccgcttgagctgcagccggacgagcgatttgaatttttcgatgccgaaaataacgcgaatatattactcctgctcgagggaaccggcgtggtttgccatgatgaaaacaatatggcgataaccacgctattttccccctcggtactggggctgattgatggatatagtaccttttacgacgtagaggccaggccgaagcattttttttctgcagaaacacattgtacatgtcaattagtgccgcttgctaagtttgtggagattatagacgagcaaaatctctggcatgatatcgcccggattctggcccaccggttattggtcatggccatccgcgagaaggagtttattggcgtggaatcattcatcatgatccggacgttgattctggaactcggctcctatcctgaggaatatcgcgagcaaatcaacgtgctcaattttatccagcggcgcaccaatctttcccgcagcggaatactgtacgtcctgtctgaactgcgcaagggggagtacatcagcgtccatcgaggcgtgctgaagggaattaataaacgaattcctatcgatttttaaataagctcataacaatacaccaacaacggcgcctgttttttagacgcaccagctctttgaattattaacatcatgatttttatacgtaattatcattattgacttgcatcattttcgaatgtccagttttggacgaaaaaattgatttagattcataaaactttctgtaagaattattcccaggacaacacggagtgtcttcttatatttaaaccgtctttttatcgccacaggggaacgttccctggtaataacttcggctataaaaaaataagcggtaatgaatgagggaatacaaaatcaatttaatgtgtatggattaaaaaatgaaaaaagcatttatggtaaaaagcgtcgttctggcaatggttatggctggcggtatttcttctgcgatggcagcgaccagcgggtcttcttccaccgttcagggcggcaccgttgagtttaaaggctctgttgttgatgcggcctgtgcggtaaccgcagacactaccaaccaggttgtgaacatgggccaggtaaaactgtctgccttcaccggtaaagactccgtggctaaccagaaaactccgttcagcatcaagctggctgactgcgataccaccatcgcttcccaggcttctgtgaccttcgacggcaacgcggctgcaggtgaagctggcgtgctggacaacacctctggcgcgggcaacgcggcgggcgtgggcatccagatttatgacaaagacggctctgcgctggatctgggtaccgcgtctcaggctgttacgctgatcgacggcgacaataccctgaacttctccgctgactactaccagactgcggataccgcaacggccggtagcgtggacaccaccgccacgttcaacgtgacttaccagtaaggtcgcgttagtcattttcatttagggatcctgtgccagggacggcggctgtgtcattgaaaggagtagatatgaatttcactacacaacggctgaaggcgttttctctcgcgggggcgtttttgtttcccgctctggcacaggcgggcaaccaccacgtggtgacggtaaagggcggcgacgttgagtttcagggcgccgtggtcaatgccgcctgcgcggtggatgccggtagcgaggatttgaccgttgagatggggcaggtgcgctccaatgaatttcatgggctgggaagctggacagatccgcaggcgtttaccattacgctgaaggattgcgataccacggtaagccagcaagtcagcgtggcctttcgcggcctgacggatggcaaagatccgggggtactggcggtgaccgacggtgcgcagagcgcgcagggcgtcgggttaggcatttttgataatcagggaaatcaaattatcccgaacacgcagccgatgaattttaccgctattcaggacaatacgaccgtactcaattttgtcgccaaatatcgcgcgacctcgagaaccgtcgtggcaggggatgcaaacgcacaaacctggttcacgttaacctatttgtaatttcctgatgccgtccgcggcaaatctttattgtgaaaggcactttatgtccgttatttctttttctcgcctgtctctggttgcgctggccttagccggtgccggtctggctgtgcccgcggcgcaggcgcaaaccgaagcgcaggcgcacgccgcggcgaacggcggggtatcactaggttccacccgcgtcatctatccgcagggcaataatcaggtctcactggcggtgaataataccgacccgaaggccacctttttaattcagtcatgggtggaaaacgccagcgaaagcaaaagcagcgattttgtcatcaccccgccgctgtttgtgatgaagccgcagaaagaaaatacgctgcgcattatgtacgtcgggccgaataatctgcctacggatcgcgaaagcctctactgggttaacgtcaaagcgattccctcggcggcaaaagacaccaaagggaaaaataccctgcagatcgcggtgctgagccggattaaactttttgttcgcccgaaaaatctgccgatggcctcgattgatgcgccggcgaagctgcgcttccacgaaagcggtaataccctgacggtgaaaaacccaacgccctattatatgacgctggtacagattcacgccggtacagcaacgttaccgacgacaatggtggcgccgatgtcgcaggcggatttaaaactgccggcgaacgcgcagggaaatatcaccttccagaccattaatgattacggggcaaactcgcccgaacagaaagccataatagaataataaacaggtcggcaaaataatgacgttaaaaataaaatatatcacccttgcggtgatgcaggttctatttgcccgccgtcgggtataccgtattattttgccggcaaccttatcggcattaccgttatccgcgctggcggataactattttaaccccgcgtttttatcggatgaccctaacgcggtggccgatctctcgcatttcgaaaagggcgatagccaggccccgggtaaatatcacgttgatatttatctgaataagcagctggtctccacggaagacgtgaactttaaagcggcaaaaggcggccaggatgataccgggctggcgccgtgctttaccaccgggcgcctggaacagatgggggtcaataccaaagccttcccggacctggcgaagctggcgccggagcagtgtgcgccctttgccgctataccggaatcctccaccgagttcgactttgagcatcagcagctgaacatcagcgtgccgcaggcggcgctgaagcagagcgcgcgcggttatattcccccggaagagtgggaccaggggatcaacgcgctgctgctgaactatgacttcaccggcggcaacagcggcggcgatacgaaagaagacagctactatctcaacctgcaaagcggcctgaacctcggcgcctggcgcctgcgcgactactccacctggaactacaccagcggcgagggcgaaacggagaacaagtgggagcatatcagcacctacgtcgagcgcacgatcgcgccgctgaaggcggaacttacgctcggggaaagctacaccccgtcggatgttttcgacagcctcggctttcgcggcgtccagattgcctccgatgacaacatgctgccggacagcctgaaaggctttgcgccgacggtgcgcgggattgcgaagagcaacgccagggtcaccatcaagcagaacggctacgttatctaccagacctacgtctcgccgggcgccttcgccattaacgatctctacccgacctcgtcgagcggcgacctgcaggtgacggtaaaagagagcgacggtagcgaaaatacctttaccgtgccgtactccgcggtgccgctgctgcagcgcgaaggacgactgaaatacgccctgaccgccggtaaataccgcagcaccaacgatgatcaggatgaggtcaatttcgcccagggaacggcgatctatggtttgccgcatggtttcaccctttacggcggttcgcaggtcagcaacgactaccacgcctttgcgctgggcgccgggctgaatatgggtgatttcggcgcgatctccgccgatatcacccaggccaacagcaccctcgccgacggcagccagcacgacggtcagtcggtgcgcttcctctacgctaaggcgctgaacgatctcggcaccaacttccagctgctgggctaccgctactcgacggaggggttctacaccctcgacgagacgacgtataaaaatatgagcggctataccggcgacaatgagtggaaagatgaggatcacgacggtaagcaggataagccggtgtggaccgattactacgatctctactacaccaaaaaaggcaaagcgcagctcaatatctcgcagcaggtcggcaaaatcggctcgatttttgtcaccggctccgagcagacctactggcacaccgatgagaaagatcgcatgttgcaggtgggctataacggcagctggaacggcatctcctatagcctgacgtggaactatgacaagtcgccgggggaagaggaggcggatcagatctacgcctttaatatttcgctgccgattggccagtggctctccagcaaccatagcgcggatatctaccgttcggccaataccaccaatatgagcttcggcaccaccaccgaccagcacggtaagaccaccgggaccaccggcatcaacgggacgctgctggcggataacaacctgagctataacgtgcaggagagcgacggcaaccacggcaccagcaacagcggcaacgccaacatgagctatcagggcacctacggcaacctgcaggcgggctacaactacagcgacggctaccaccaggtgaactacggggtgagcggcggcgtggtggtccaccgcaacggcgtcacccttagccagccgctcggcgacaccaacattctggtgaaagcgccgggggcggccggcgtcgagctggaaaacgccaccggggtgaaaaccgactggcgcggctacgcggtgatcccgtacgccaccacctatcgccagaaccgcgtggcgctgaataccaactccatggggcagaacgtcgatattgaagacgcggtcaccaacgtggtgccgacccagggggcgctggtgcgcgccgaatttaacgcccacgtcggggtgcgcgcgctgatgaccctgatgcataacggcaagccggtgccgttcggcgccacggtcagccagaaggcgggtaacagcaccatcgtcggcgacgacggccaggcctatctcgccgggctgccactgaacggcatgctggaagtgcagtggggcgagagcgccggacagcactgcatggtgaaatatcaacttccggagagcgcgaagcagcagccggtgaataaagtcagcgaaaggtgccagtgatgaaaataaatgggcgtttgaacatgctaatagcattattgctattgagctggtcggccgtgacatgggcatatagttatgcttgtgaaccctcgggtggaacaaaagaatataatgcaagctttggcacttatactataacggatccaagtaaagatcaggcaggaacgatatttgaaaatgcagcctcctatagttcaggcggggtagcatcaatgacatgcgactgtccctctggttacatgtacgatcgttatttctggagcaaaacgtctttaacagttgacgaagaaattgatggtgagacgtactacgtagtcaatgaatatctggatgcgagtgtgtctatttatcttggcggagctgttaacaaatacgaaccgctgccatggactgctttggataataaagaaatggataggggaggatgtggtgggagtgttacatcagatgtcacaacgggtagcaaaggtacaatttcgctgaggattagcaaaccctttgttgggtcatttagtatacctaatctaaaagtcgcagatatttatgtggggcgctctgcaactggcgcttatggtgacacccctataacctcggtttatttatcgggtaacgttatcgtcccccaaacctgctccgttaacgccgggcaaattgtgaccgttgattttggctcctttatgtcgggtgagtttaaaaacaagggccagatgcccaccggctatacgccgaaaaccatcaccgtgccgattaaatgtaacgggatggatgctaacgccagcttaaccctgcgcttccaggcggaagcctcgacggatgaaccggcggcgattaagaccagcaacgacgatgtcggcgtgcagatcaccgatgacagcggcaaggtgattgagccgaacagcggcctgattcctttccaactggatgacaatatgcaggcgacggtgacctttcacgccgcgccgattagcaccaccggaaacgccccggcagagggaaccttttcggcgacagcctatattcgcgtcgactttgcatgaagcgcaaaaaacgctaaacggcatgttggtggtattgcggatcgaggtcaggcaataacgtcagatgcaatattaacgatctgtaagcatgaagcagtagccggtcagtatatccagtaaaaggtctagtaatgaaaaaatgtatcgctctatcaattgtactcatggccttgataaagttaatcagcgttcctgtatatgctaccgattatccttctggttcatgttatcttcctgatggatctacaaaaggaacgtatgattttaatatcaatacggtcgtatccgatcctacgcaaaacacatccggggagattttacccgccgtgaactcgaacagtagcggttcattctccgttgagtgctcttgccagggcgattcggttttttatacgcatcaatggacaacaacggatctggtttcgacgggaacctcaggaagtttgaatttttataaagcgaatgactatctttcagtggcgggtgagatcaaaaacccgggtgatggcacatattattctttgcccttggttgacttttataagcccgttgggggggggatgttatgtaatgatgtgacttcaggttttcattttggcaataacgttagagttacgttcagaatagatcgtaaatttgttgggacggtgagtttgccgcatataaaattatttgatttatggtacaccgtcggcagtgattttgtgcaaggctcgccagtggctaccgcttatattgatggccaaatatcggtcccccaaacctgctccgttaacgccgggcagatcgtgaccgttgattttggctcatttatgtcgggcgaatttaaaaacaagggccagatgcccactggctatacgccaaaaacaatttcggtaccgattaaatgtaatggcatagaggccaatgctaatttgacggttcgcttcctggcggaagcttcggcggatgaaccggcggcgattaagaccagcaacgacgatgtcggtgtgcagattaccgataacagcggcaaggtgattgagccgaacagcggtctgctcccgttccagctggatgacaatctgcaggcgacggtgacctttcacgccgcgccgattagcaccaccggaaacgccccggcagagggaaccttttcggcgacggcctatattcgcgttgactttgcctgaggaaaaaagatgaaaccggcaacactattcttccccctgttgatgaccttcgcgggcgtgcatagcgcaagcgccgatgatattgatagcggccaggtcgagctggatatgaccggcactatcgtcgcggaaagctgcgatatcgacaccgccagccagaaccagactatccatatcggcgatttcagcgccgggatatttcaaagcgtcggcgatacctcggagtggaagcagtttgatatcaaattaaataactgcacctcggcgatcagccagtcgacggtggcgttcagcggcacgtcggacggcagcgacccatcgctgttagccctctccgatacctccggcggcggcggaatggccagcggcgtggcgattgagctgctggacagcagtatgaacaccattgcgattaacagtaccgataacggatacccgattacccagggaaataacgatctgacgtttcgcctgcgctataaagctaccgcggtgccggttacgcccggcaacgcctcttcggtactctattttgatgtgagctatcaataatgaaaaagacgatcctgctgttatcgctatcctgcttgtcctgctcagcgctggcccacgacggcaccgtaaacattaccggcacgatccagggaaacacctgtaccgtgaccaccgataccgcgaaccagcaggtgaccctgggcgacattgcggcgaaacagtttaccgcggccggcagcgcctcccagccggtggcgttcaccatcgggctggaaaactgcggcagcgcggcgtcggcggtctcattaacctttaccggcgaggcggatacgaccaacagcgccctgctggcgttaaccagccaggcgggcagcgccgcgggcgtcggggtggcgatcttagacagccagcgtacgctggtgccgctgaacagcaccagccgccagtatacgctcgacccgcagcaaaccagccagaacctcaccttttacggtgagatggtagcgacgagcagcccggttaccgccggcagcgttgacgccacgaccacctttagcctgacctatcagtagcctgtccatgttgagaaaaatcgctgtactgctggcgctcagcgccttatcccttcaggcgcaggcgggcgtggtgatcggggggacccgctttatttataatgagggtaagccgtcgatatcgttccgggtgatcaatcaatcgccctcgcgctacttgattctgagcaaaattgttgccgatggcgacccgcaggcggcggtgccttttgtggcgacgccgccggtctttgcgctaaacggccataaagaaaatgaaattcgcgtgatgtacaccagcggccagctgccggcggaccgcgaaagtctgttttgggtcacggtggccaatatccctcaggccgacagtcagcagcagaataccctgcagattgcggtgcgcagccgcatgaagctgttctatcgcccgaaaggcgtacaaggggattcacagcaggcttatcgccagctgacctggcggcgcgagggtaaaacggtaacggtgcagaacccgacgccgttttacgtcacgctgctgaatatgcaggccaacggccagagtatcgccggggccgggatggtcgcgccgctttccagccgctcggtggcgtggtgtccggcgcagggcggctgcgcgctgcagtggcagacccttaacgactatggtagggccatgccggccatgcatatttcgcccgatgtgcaggccaggaaggggcaataagatgcaaacaaaactcggggaggcgccggtaacggcggcctcccgctggctccttatgatgctggcgctgatcctgcttggcgttatgcatattgtcctgcccagcaccggcggcagcggcgctgatttaccggaaccgctgctggtctggtgcgtgctgctggtcgcgatggtcggctgcgcctggtttttgcggcatcagaggctacgcagcagcccgttcctgcgcggcatggcgctggcggcgttactgctgacgctgcccctgctctggagcccctccgccgactggcggctggacgccttcccgcgcctggcgggcctgtgggcgggcgtggcgttttattatctgctgctgaactgtcggctcacgccgcgtcagcagcagaccgtactatggctgatcgtcgccgccaccctgattcaggcggtctatgcgctggtgggtatcggtcatccggcgtggctgccgctgccggcgcaggcggcgcagcgccaggccggtcagttcgcgatcggcgtttttctgcaacgcaacgtcaccggctcctttattgccaccggcgccgcggtgctgctgtggctggcggccgatgcccgctttgtctgccgcagcgtcgcgagggagagatatcgtcagtggggaagcgcgctcgggctcgggctgctctacgccacgctgaccctgctgaaatcccgcaccggatggctgggcggcgtggtctgctggctgatgatggtgaccattttttgcttctcgccgttacgccgctccgccgcgcgcggggcacgctggcgtgtcgtactggcgccggtggccggtgtgctgctggggcttgccctgctatcggtctcgttactcaacgccctgcatgaacatgacggctcgaatcttgagcgggtttttattctgcagcagacctggaaaatgatactgcagcatccgatcgtcggctggggctacgggggatacgcctggtcctttgcccatttcgtggccgatagcgtcccgccgttgtcccgccgggtcccggggttaacctatccgcataatgacctgctgttctggtgggtcgagggcggagcggtcgccctgctcgggctgctggtgctgggggttagcggattcaggctactgctgcgccgccccggcgtacggcagctggcgctgctggcctgcctgatgcccattttgctgcacacgcagctggagtatccgctgtatcaatcgccggtacactggttgctcgttcttatcctggtcaacctggccgatcgctgtccgaccggcgaacaggcgccgctgtccgcattcaccgcgccctccacgcggccggtgccctgcgcgctgatgatcctggcctgctacggcgcgctgctcaccggctgcgccttctggcagggacactatctgaccgcttttcagcagtcgccgcagcgttttgccagccgcgtactgcggctgcatgacatcggcatcggcagcgaaaggctgcgtaaagatcgggcgctcagctatatcatccgctatcagtcgagcgctaacgtggaggatctggaggctttcaaccagctcggcaggcgctggattgcggtgtggaacgacgccgatatgtacaacaatcttattaacgtcgagcggtatcttgggcaacagcaaaacgcccgggctttgcgcgaggaggcccggcggctctatcctgaggaccggcgtttttcatcgtagccacgatgcctgttatgatcccgggctcagcgtcgcagaggcagctgagcctttttacgtatattgccggtcggggctgaaaaaatattgattgaatataattagcagtgtaattatctcctgtggtttgaaattgatttcaaaaatgcccaacacaggagtgttaccccatggacgcacgtcaatgcactgccgcagcggctttacttctcgcctgcacttcttctttttgctacgccggccataccggaaaagtccgcttcattggcacggttgtggagtcgggatgctggaacacgcccggccaaaatgaattattctgttatcgcgataagaccatttctcattattccgcggcgcacgtcagcagcgtttcgctggatgtcagtaatgcggtggtgcaaaaaacatttcttgataaacaaaagcagcttgaacagttaacgattaattactattaagtttaatgacatttaaatatcttcagctcattgggttgaagatatttatctcgtcagaaaattaagatgttagcaagaaattacataattttattattcttacaatctacgaccactttatcgctgcgaatttattgaatcaccacatattcctctatactattcctcatatgttttacgcagaaaagaaataatatatggctaaggtggttttatttccgcagatcgcttcttcgctggagtggttaaaagggcatggcgatacaattcttcagtatggctggaacgtgattgccgcttgtattctcttttttatcggccgggttgtctcaaccttattatctaaaggtatcgagaaaatacttctgcggcgcagggtagatattaccgttatccatttctttgccgccctggtacgctatatcacgctggcgtttgcggccatcgccgcgcttggccgcttaggcatagaaacgtcctcaattattgcggttatcggcgcggcggggctggcggtggggcttgcgctgcagggatcgctatcaaactttgccgctggcgtactgctagtcacgctacgtcctttccgggccggaaacctggtgcagatcggcgccattaccggagtggtggaatccgtacatatattttctaccaccttgctcaccgcggataataaagacgtggtgatcccgaacggcaaaattatcgccgacagcatcgttaactattcgcgccatccatttcggcgtatcgatttgatgattagcgtcggctacgatagccggattgcggaagtgaagcgcgttattctggcggtcatcgatgctgacagacgcatcgatcggcagcgtgacaccaccgttcgtctggccgaacttggcgcctcgtcacttaattttaccgtgcgcgtgtgggtgaaaaacacccattactgggatacctattacgatctgctggagaatattaaagaggcgctggacgaacatcatattacgattccttatccgcagatggatattcgcgtggccggcaccgtaccaacgttatcctgatggctgagatgatatgaatccgaaagtgatgggttgtatggctgtctgttttctgctgacgggctgcggcagcgtcatgggaagaaccactctggcggagggcgaaacgtggtatccaggggttaaaacggatatcgcggtgatccgcggtgacagcgagtatgattataattatcttcagggcacattatggaccctggatacgccgctgtcgtttattggtgatacgctgatgctgccggttgattatttccacggcccttggttaattcactctgcaaaataaaatatattataagatggtgtttattcattatgagttctattttacatgtggccgtaatgtctccaaatcgttatttctgcctggggctgaatagcctgcatgaacaaaaggcgatgcccgctattcagctgcacttttgtcacgacctgaagtccttaaaagcattaatggagagcgttacgctctccggcgtgctaatggaaacgtttggtgaaggagagaacatctacgatgcgtttgtttttggcgattatctaaaaaggcaggccagagacatcgccgtgtttgtttttcgctcattctggagcaatctttctgatttgccgcattatgcgcgctatcatgtttcctcaactgaagatgaaatatgggaatatttgaaattaatactgaggggctatcagcgaaataattatatctcccgctgggagaccctgctgacccataaagagtatcaagtgatcagaatgctgtgctgcggaaagcagtatcatcacatagggaaatcactgggtattacgattaaaaccgtgagcacgcataaaatcaaagcgctgaaaaaactcggcgcgcccagcatgtcatctttaattctacaatttaaacgctaatggtcgcgtacggcgtagcaggctgccgtggccgggcgtgcatagaccatccgcggatccccgcatgctgcgtatttatcgcgccagccaacgccatcccgcagcaatagcataatctcttattctcccttcctgtattctgctttcctgttgatggtgctcgtaatatattctcgcctggttttaataaaaacccataatagggctatgaaattgcgaaggctaaacgtgattccatgtaacaaagcaacatgtgaactggcttacattttcaaccgcgctcgccatttatagtgagcgccagtgttagggggcgtattcaatcatcatggcatccattaaagacgtagcgaaaagagcgggggtctcgacggcgaccgtatcgcgagtgctcaacaatcatcccagcgtcgtgccggaaacgcggcaggcggtgcgtgatgcgatggattacctctgctatgtccccagcaagagttcgtttcagcttagcgggaaatgttcagggctgattggtgtggttttgcctaatctggtgaatcctcacttctgcgaactgttggcgacggtagaagaagaggcccggtatatcggcaaatcggtgatcgttaaaacgcatcagaaccagccgcagcaggataaacatattattcagaccttagtagggatgggcattgacagcttgctatgggtgccgacagaagctgaagccgaactttcagaatggttaagcattacccggatcccggtcgccgttgtcacccaggtgtcccggttctttaattccgtatcgattaaccaggatcggggggcggaaagtattgcggaacattttattcatacgggccatctttcatttggctttgttgcccaggaaggggtggatagccgcaaggtctcgtcgtacagcaaaaaaatagcgagtcacggtttaaagcttgcgaaagataattcgttctggatagccaaaggcgagggtgaaaagatatcaggccatattagtattcttgatgacattatcgagaaactcagcgagccgacgcgaacctgtacatgtctgttagtgtataacgatattgcggcaaactatattatcgatgggctaaaagaaaagagcatctccgttcctgaagatattgcgattgccagctttgataataccctgctggcgcaaactaaaaaaatcaccagcgttgcacagccggtaaatgaaattgctcacctcgcgtttcagatggtgaaacatcaacagcagccggacagtattgaaatgcacgaaattgtctcgcggttaattatccgtgagagcagcgtaaaaattaatattacttccctgtaagggatttatgtttagaaatggcgcgacaatttgcgccatgggctccttttaacaaaaaataggtatatttatgtctgctaccgcaatggaaaagccaagcgcttatgaaaagctggggctgagggagaagatcggctacggcatgggtgacgctggttcaggaatgatatggagcgtactggcgctctatctgacgtggttttataccgatgtatatggcctgaacgccggggtggtgggcacattattcctggttatccgcatctttgacgcttttagcgatccgctgatgggggccatctgcgaccgcaccgtctcgcgctggggtaaattccgcccatggttattatggatggcgtttccgtttggtctgggcgcggtactgatgttcacgaccccagagctcagcatgaacggcaagattatctatgcctgggttacctatctggtcatgtcgctgatttataccgcgattaatattccctattgctcggtcggcggcgtcattacgctcaatcagaaagagcgcatgggctgcctgtcgtggcgctttttccttaatggcctggcaacattaattatctcctcctctattctgccgttaacggactggctgggtaacggcgatcgtgcgtccggtttccagctaaccatgatcattatgggcggtgcggcaacgctgatgttcctgttctgcttttccagcattaaagagcgggtggtatcggttaagcaaaacgagtcgttgaagaaagacctgcgggatattatcaaaaacgatcagtggctcttgatgatcactattaccttcctgaacgttttcccggcatttatccgcggcggcgtcactatctattatgctacttacgtcatgaaagagtcggtcggatttattaccttctttatggcgctgggcgtggcctgtaatatgctgggcagcgtgcttgccaaaccgctgaccgatcgctttgataagctggcgctgttccgcattattaatattattctcggcattctctcatttgcgctgtggtttgttgatccgcaatccctgaccccgctgatgacgctattcatcattattaacgttctgcatttaattcagtctggtcccattttgtgggcgatgatgtccgatgtcgatgactacggtgactggaaatttggtaaacgcctgaccggcatctccttcgcgggaaacctgtttatgctcaaaatggggctggcggtcgccggcgctatcgtcgcctggattctggcgtttaccggctatgtcgcgaatgagccgcagcaaaattcgcagaccattcaaggcattatcatgatgttctcactgctgccgatggtgagttatttcatcagcgcgtatctggtgcgctacttcaagctgaataacgcgttccttgagaaaatcaaaacggatcttgcaaaacgtgagctggaaaaaggtcgcggtcaaccacaggaggttcaggatgtccctgtcatttaatattaaacaaggtcagcgcattgatttgtggctgaaagcgtccgaaccggcggcgcaacccctgttttctattcgcgtgaacggtcaggttgtatttaagattcaggaggcgccgcgctacttccagtattttacctggacctcgtttcaggacggcgttgccaccctggagtggctgccggaatatagcgagatatcgctttgttacacctggcatccggattcactgcgcgcgcgcggcgtcacctttatcgcgacagccgggcaggatttgcgcctgatgagcggtcaggatattgctgacgagtatctgcgggagccgctgcgcccggcattgcatttctcgccgcgtaccggctggatgaacgaccctaacgggctgcactacaagaacggcgagtggcatctgttttaccagtatcatccgcactccagccaatggggccccatgcactggaatcatgctgtgagccgcgatctgtatcactggcggcattatccggttttcctccagccggagcagaatctttccgcgctgggcgcgacgggcggcgcgttttccggcagcgcgtatattgataaacaaggaaaaacccgcttctggtataccgaacggctcccggcttacgatctgtatcgcggctaccgggaagtgcagaaaatggccgttgcgcacgacgactacgataagccggaatgggtgaaaaccgtcttaaccgacctgcctgcgggcgtggactgcgatttccgcgatccaaaagtgtggtacgaagaggccgatgccaccttttatatgatcctcggcgcctcggtaaacggcgatccggcgatgctgctctttcactctgcggatagtgaacgctggacgttccatcatgtgctgtatgtcgctcccggctattttcgcgaaaacggcggtcgctgcgtcgaatgcccggatttcttctgcctggatggcgtatgggtattaattatcggcgtcgttggctacaaggagccgacaaccgggcggcataatttgctttttgcccagaccggtactttccggaacggttatttcacgccgtccgagcagccgctacagactttagatttcggtacggatttctacgccctgcaaacctggggcgaggacgaccgaagaatcggctttgcctggttatataactgggcgacgcagaaaccggtggattccgcttactcgggggaaatgtcgctcccgcgtcgctttcatctcaatgcgcagcagcggctatgcatgatgccggagctgccgccggaatcattggtcgtcagccgccatgcgctggatgacggtgatatctgggttaatgagaaaggctgtaaagccggcattgtaacctttatgcctgccggtggtttccgtttgacgttaacgggcgatagcggccagcaaatcatcctcgaacaggagggtaaaaatctgacgctatatgaaaaaggccgggacgatgggcgttaccgcgcgccggtagccagcgtcagcgacgtcacgctgtgttttgatgccgggattgttgaggtcttcgcaaatcagggcagcgtatgcggtacgcgacgctattactcatgcagtcagctcacccggatccagctctccggcgcgccggcacagcttacgcaatatcgctcgacgtattcgcaggaataagcaaagtcaaatttaagcgttgatgttcgatttcttattatcattagaggcggtttttcatggtacgtaaaaattattatgatgttacgcagtggcacgttggcaatccgtatgaggatattggcgaagtcattaacagtattctcgccgatattaaatcgcgacaaacggaaatcgatattaacgacgggggtaaaccgggcgccgcgatttatattccgcccggcgattatcatctgaagacgcaggtcttaattgatatcagttatttaaaaattatgggttccgggcatggttttgtctcctcgagcattcgctttaatacgccggcggacgagtgggcgaatttgcacgatatatggccgggcgggagccgtattctggtcgatctctgcccgcagcccggcgatgaagaacacgctggcgctgcattttacgtgaaacgcagcggggcgccgcgtatcagttcggtggcgttcgaaaacttctgtattgatggtttgcactttgttgatgatgggctgggaaacaacgacccggaaaatagctatacgaacggcaaaaccgggatttatatcgccagcgcgcaggatgctttccgcattaccgggatgggatttatctatctggagcatggcctcaccgcgtacaatagcgatgcaatggcgatccataataactttatcgccgaatgcggtaactgtatcgagctgcgtggcgccgggcaggcttcaaaaataaccgataacctgattggcgcgggctataaaggctattctatttatgccgaaaattttggtgggctattaatttctaccaacaatatcttcccgcgcggcgcaagcagcgttcacttatcgggcgtggtccgctctagcatcaccagcaatcgattccattcattttatccgggaatgctcgttctcgagaacaactgtgcggagaatctgatctcggcaaaccatttcttgcgcgatcgtgaaccctggccgccgatgcaggcctatgacaacggcctggatgatgcctatggcttgctgcatataaacggcagtaataattcggttattgccaatcatatttccgaaacgattgatgtccagtatctcaagccgcagggaataaaaccggtcatcatccgccttgtttccggcaaagggaattatattgcgaataaccatatcgtggcgaccacggagacgtcagcggcgcaggcgcagccctccgaagaggatgcctgctttgcggcgcaggtcagcgctttgctgacgacggccaggttaaaagaactcgatgcggtcgccgtgcaggtagaaaaagaatccgcgcaaaacacgatacttgatagcggcagtgacgcacaggtggtcatagaccgagcgcgtaatgccttcagggcgacaccggttgctggaaattaatattcactctgtttgttaatctgtatagcgaatgacgttatttaaggaggcagattacacgttatttcattcattcttctgctaaataaaaatcaaaatataaaaggtgaatatttttattcaccttatcccaccttttacctctgggaaaataaaaatgaataaaacaacattatcaatagcgctaggcttgtgtttaataacgggatcggcggtcgggaaaaataatcaactgacgctggaacaacgaatggaacagcttgaagcgcggcttgccgccgcggaaagccgggcgacggtagcggaaggccaggtgcgggatttacaggcgaagcagaatgccgcgattcaggcggcgcaaacccgtgtgccggtaaacagcgcggcggcaaccgcggagagtaaaaagaatcttagcgtcccggagctgaaattatccggctatggcgatctgaaaatctacggcgacgtggagttcaacatggacgcggaaagcaaacacggcctgctggcgatgaccaacgccgatgtcggcagcgatcccacctacgataagtgggatttaaacggccgtatcctgctcggcttcgacggtatccgcaaaacggataacggctattttgccggtttctctgtccagccgctggcggatatgaccggctcgatgaacctcgacgacgcggtattcttctttggtcaggagaacgactggaaggtgaaagtggggcgctttgaagcgtacgacatgttcccgctgaatcaggacaccttcgtcgagcactccggtaataccgccaacgacctctacagcgacggccatggctatatctatatgatgaaagagggtcgcggccgctctgacgcaggcggcaacttcctgctgagcaagcagcttgataactggtattttgagctcaacaccctgctggaagacggtacgtcgctgtacgacaacgatggctaccatggtcgcgatatggagcagaaaaagaacgtcgcctatttgcgtccggtggtgtcatgggcgaaagacgaattttccgttgccgcggccatggaagcgaacgtggtgcagaacgcctacggctataaagatgcccagggcaactttatcgatcagtcggggcgcaccggctatggcctgaccatgacctggaacggcctgaagcgcgacccggaggacggggtggtgatgaatctgaataccgcttatatggacgccagcaacgaacaggattttaccgccggggtgaacgcgctgtggcggcgcttcgagctgggatatatctacgcgcataacaaaatcagcgattatgccggggtgatttgcgagaacgactgctggattaaggatgaaggcacctacaatattcataccttccacgcgtcgtatcaaattccgaacgtgatgaatatgcagaactttaatatctatctcggcgcctattactccattctcgacagcgacgagaagctgagcctgggggatgatgacgatcgctacggcgcgcgggtgcgctttaagtacttcttctaagcgcttgaaacggctgccccgctcagcacaacggggcagccatagttttactccagataaaacacctctttaagctccgcgcttaccggactgttgtccggattggcaggcatcacatcgcgcatatgctgccaccagcgctggcacacctcggtcccggcgacggcgtcccagcgcgcttcggattcaatctccaccgtggcgaacagcagatggcgctctttatcgagataaatcgcgtagtggtgcgcgccgtgggctttcagcaccgcttccagttccggccagatggggttatgacggcgctgatactcttcatgcgcgtccgggtttacctgcatcacgaaagctttgcggatcataatgcctccagatagagttcgcggacttcatcgcggctggcggtgcgcggattgcacggtgcgcacgggtcggccagcgctttatccagccagccttcaatatcggctttgctgacgccaagctggctgaagccttgcggaatgccgacgcgtttgcttagcgcgcggatggcgttgatggcctccatgctggccgcttcatcgctcataccgcgagtatcgacgcccatcgcctgcgccacgcgcgcgaagcgggcaaccgcgttcgggcgattaaagttttcgatgatcggcagcaggatggcgttgcacacgccgtgcggcaggttgtgggtagcgcccggctgatgagccagcgcatgcaccaggccaagaccggcgctgttaaacgccatgcccgccagatactggccaaacgccatctgctcgcgggcttcaagattgtgtccgtcgtccacggcttgcggcagccattggttgatcaggcgaatcgcttccagggcattggcatcggtcagcgggtgcgcgccaacggaaacaaaggcttcaatggcgtgggtcagcgcgtccatgccggtggcggcggtaatggacggcgggatatccagcatcacgctggcgtcatcgacggcgatatcgggaatgatattggggtcgataatcacctcttttacctggcgctcggcgtcgataataaccgcgttgctggtcatctccgccgcggtgccggcggtcgtgttgatggccaccagcggcacgccggcgtttttcactttgccgacgccggaataggcggtcgatggccccgggttggcggtgaggatttttatcgctttggcggtatcaatcgggctgccgccgccgaaggcgataaggtaatcacatccggcctcccgatactccgcgtagcctttttgcaccagcgcttccgttgggttagggaacacctcgtcaaacagatggtaagacatctgctgttcatccagggcggtaaacaggctgtcgagcagccccagcttcaccagctggccgtcggtgacgatcagcgctttgccccagcgtttacccgccaccagcttgaccatatcgccgattgcgcccgcgccatggaggctgattttgggcagtgccaacataaaactcatgataattctccttaatgttgatttgggtaatccgtttcccttcacccgcccccgggtcgcggctggcgccttacccgggctacacgtaccggtcagattagggggaaggggaaattaaattcgtcttcgctgcatcatccgccgggtaataatcggcagcgagatcaccacgatcagcatcgcgccgatgatgatcgacatcacgatccccggcacgttgagcaggctcaggccaaacgtcaccagccccatcaggaaggcggcgataatcacccccaccatgctgccggagccgccgagaatattgacgccgccgagcaccgccatcgtgacgaccgccagctcccagcccatcgccagcgtcgggcgggtgctgccgagcctcgaggtcagcaggaccgccgccagcccggccatcagcccgaccagcgcgaacagcaccagattgtggcgcttgacgttgatcccggagaaccaggctccggtcgggttattgccgatggcgtaggtccggcggccaaagttggttttatgcagcaggaaggtaaaggcggcggcgaggaggataaacagcgcgaactcaaaagagagcgctccccacacgtagccctggccgaaccaggcgaagctgtccgggtagtgattgagcgccttgtcgcccagcagaatgtaggttattccgcgatacaggctcatggtgccgatggtgatcacaatcgacgacaggttaaagcgcgtcaccaggataccgttgaacaggccgcacagcagccccacgcccagcccgacggccaccagcagcggcgtatccatacccgccgccgcgcagaagcccatcgccgttgagctcagcgccatcgtcgaggctaccgaaaggtcgatctctctggcgataatcagcatcgccatcggcagcacgatgatcgctttttccgtaaagttaaacgtggcgtccgacaggttccagatattaaggaaccagggtgacgccagggcgttaaccacgaataccgccagggttaccgccagcagaaacccttcccagcacagcaagcggcgcagcggcgacggcgcggccggggcgcttttcatctcttcagacatcattattttgctcatgatttcaccgcctgtttctgccgcgccagcgccgcgttgcgcaggattaaccgcccgccacctttattaccgcgttcgttaagcagcaccgcaatgacgatcaccgcgccggaaatggccatttgccagaacggcgaaatgccaatcaccggcagcgcgttattgataacgccgaggaacagcgcgccgcacaggcagccgagcacgcgaccggttccgcccatggtgctgatgccgccgatgacgcaggcggcgaccacctgcagttcaaaaccgttggcgacatcgacataggcgacggcgaagcgcgagatccacagatagccgcagaacccggccagcgcgccggagaggcagaagctgacaaactgcattttcccggcgttaatcccggtgtagtacgccgccgtcgcgttgccgcccgcggtgtacaaggcccggccggtgcggctgtagcggaggaaatagcccaccagcagcagcgcggcgatggcgcaccagctcagcagcggcagccccagcagcgaggcgcgcggcaggccgagaaaatcggcgctcatctggtgtgagttgacccagccgccgttggaaagcagaaagataatcccgcgataaatactcatggtgcccagcgtgaccacgatggccggaatgccgagccgccagaccagcaggccgttaatcatccccatcagcaggccaagcagggtcgccagcgccagcagcgccgccaccgggatacccggatagtgggcgttgagcagcgcgacgatcatcccggtcagcgccagattggcggccatcgacagatcgatgcctttggtgagcagcaccatcatctggccgagggcgaggacgatcagaatggcggtgtcgttaaacatctccaccagattgcccggcgagacgaacgacggcgcccggctgccgatagcgccgatcagcaaaacgatcaccgccgccagcagcgcttcgcggtgtttaagcagttgtttacccattacgctgcctcccgaccggcgccgctggcggcgctgacgatggtttccgccgtcgcttcaccggcgcgatactcggccaccatcagcccttcgtgcatcacgataatccggtcggccatgcccatcacttccggcagctccgaagagaccataatgaccgccagcccctggctgaccagctcggacataaactggtgcaccgccgctttggagccgatatcgatgcctttagtcggttcgtcgaggataatcacctcgggatgggtcgccagccatttgccgatcaccactttttgctgattgccgccggaaagggtttccaccgcctgccgccagctaaaggccttaacctgcaggcgcgaggcgtactcgtccgccagccgccattcgcgggcgtcgttaagcacgccgccggggttcagtttgctgagctgcggcaggctgatgttctgggcgatcggcagggcgataattgctccctgcttctgccgctcttccggcacgcagacgataccggcgccgatcgcgtcggccggctggcgaaagcgcatcggtttccccttcagcacgatatcgccggaagagggatgcgagactccggagagcgcctgcatcagctcggtgcgcccggcgcccaccagcccgtaaaagccaagaatctcccctttgcgcaggctgaagctgatatgggcgaactcggtggggtggcagaggtctttcacctccagcaccgtttcccctgggatacaatcgactttcgggtaggtttgggtaatcgcgcggcccaccatcatcgccaccatccgctcttcggtgatgtcgttgatcgcaccggagctgacgtacacgccgtcgcgcagaatggtgtagtagtccgccagctcgaaaatctcatcgaacttatgcgagataaacaggatcgctttgccgtcctgcttcaggcgctcaacgatctgatagaactccagaatttcatgctgcgagagcgcggcggtcggctcatcgaggattaccacctgagcttcaaaggagagcgcccgggcgatggcgaccatatggcgctgggcgatactgagggttttcagcgtcgcgcgcgggtcaatctgtacctcgaggcgggtgagaatttcgctggctttgcggtgcatggcgggccagtcgagcttcttcagcaggccgcgatgcagatactggccgacgaagatattttcggtgaccgagagttcgtcgaacagcacggtttcctgatgaatcgcggtgatcccgaccttatgcgccgactccggattcggtagttggatagggatcgctttatagagaatctcgccctcttcgggctgataaataccggtcatcactttgaccagcgtcgatttccccgcgccgttttcgccgattaaagcggtcactttgccgggccagagatcgagctgtacgttttcaagagcgcgcacaccgggaaaaatcttggtgatgccctttagcgacagcagtggggtggatgctgacatgatagttctccgtaaaatcacccctcaccctaaccctctccccaaaggggcgaaggaaccgttcagtgctcgctggcagcagtgcgcagagggcctgactttctccctctctttttggaagagggccggagtgaggaaacagggttagaaaattttcgagaacttatcgatgttgctcgcatcgtagacgaacggttcggccatcgcgccgctaccgtcggcgtccagcttcactttgcccagcttgcccatattggcttcggttttggtcgccgtgcctttgactaaatcgtcggccagatacgtggcggcgtagccaaggtcaatcgggttccagatggcgaagcttttgctggcgccggacttaatcgcccccgccatttccgacggcagccccagcccggtgacgtagaccttgccgattttgccctgatctttcaccgcctgcgcggcggccacgatccccaccgacgaaggcgaaacaatcactttcaggtcagggtatgacttcagcaggcccaccgcttcgcgatagcttttatccgacagatcgtcaccgtaggcgacggtcaccagattgacggacggatactgcggcagcacctttttcatctcctcaatccagatgttctggttggtggaggttggggtggcgcttaaaatcgccacatcgcctttttccacgttcagcgccttcagcgcatcggcggcgagcttaacgttggtttcgccaatcagcgcgttattggacgggttaagatggatctggcggcccgccggcgcgacgccggagtcccaggagaccaccttaatgccgcgctgcatcgcttttttcagtaccggcaccacggcgtcgggatcgttagcggaaatggcgatcgcatccaccccctgggcgatcaaaccattcagcacttcgatctgcgcttcggcggtggtggtggtcgggccggtatagatcactttgacatcgcctaactctttggccgcttcctgcgcgccgacgttcgctgcttcgaagaatccatttcccaatgatttcgccacgagggcgattttgacttcggctaaagcggaaccggacaacgccaggatggcaacggtgaggatcaagcttgtgtttgttttcattgcttttactccacatgagttagtttgtagggtttgcaggtgattttttcgccccgtctcggtgagcggggcgcgatgttgttatggataaaggtctaacgcggactgcaggggttgaacgttgaagcgtttgccaagggcgaccagctcttcgcgggtgatggtttgtttcatcccgcccattgagtaaactttcaccagcacctcggcggatttctcagcggtatcgatcaggccgaaagtttcgtccagattagggccgctgccgaaaacgccgtggaacggccacagcaccagcgaatgtttctgcatcgcctcggcggtggcctggccgatttcgtcggtgcccggcaccatccacggcaggatcccgacgccgtccgggaagaccaccaggcattcggtactcccttcccacagcttgcgggtaaacagatcgctgctgttctccagcacgtaggtcagggcgatcagattggtggcgtggcagtgcatgatcacccggtctttaccgttggtcagccggatgcgctcgctgtgcgacaggaagtgcgccggcagctcggatgttggcaccgcatcgttggtcaggccccaaagaatatggtatcccgcgccgtcgctgtcgactttcaccaccccgaggttcgccgccgggtcgagctggacgttacggaagaatttaccggaaccggtgacgataaacggctggttagccagcgtcggcatcggctggctcagggcgatatagcgcggtttagcgtggaaatccgccgcgtagggttcgatatccgcttcgtcgaggcgcagcgtcaggttgccgccgttgcgctcgtcccagcctttcagccaggcgtcagaagtggctttaatcatgccctggacgaaccaggcgtcgataatggtctgcatagtcttgtctttcctgttgattcggcgcggggttggcccctcgccctgaatatgtgcgagcccccggattgcgccgtaaacggcttatccgggctaccggtttgtagcccggccgcgacccggggaacgtccgggctttacccgcgctggctcagaaccgcattctcataagcgcgtacgttatccagccactggctgcctgccggcgtatcgtgacgctgacagtacatctcccagatggcctgccacggcaggcacttctgctcttccagcagcgccaggcgggcggtgtagtcgccgtcgacttccagctgacgcagctgcccggtcggttccagcagggcgcgcagcagcgctttcttcatattgcgcgtgccaatcacccacgccgcgatgcggttaatcgaagcgtcgaagaaatcgagaccgatatgcacgcggtcgaacagatcgtgacggatgatttcgctggcgatggcctgggtttcgtcatccagcagcaccacgtggtcgctgtcccagcgtaccggacggctgacgtgcagcagcagacgcgggatatagagcatggcggcggagattttgtcggagatgacctccgtcgggtggaagtggccggcatccaggcacagggcggtctggcggctggtggcgtagcccatatagaactcattggagccgacggtgtagctttccgcgccgataccgaacagtttgctctcgacggcatcaatgtggtgcgccgggtccagcttttcgctgatcacttcatcgagcgcgttcagcaggcgctggcgcggcgcgaagcggtcaacggtaatatccttcatgccgtccgggatccagatattcattaccgacggcgtgcccagctgctcgccgaagtaagcggaaatacggcggctggccttgcagtgatcgatccagaactggcggatttcatcgttggcgtgcgacagcgtaaagccgtcagcgcttagcggatgcgagaagcaggaggggttaaaatcgagccccagcttgttggctttcgcccactcaacccagtttttaaagtgctccggcttaatttcattgcgcggcaccggcgcgtcggattcgagatagagcgcgtgcaggttcaggcgttttggcccggggatcaggctcagcgcctgctcaaggtcggcgcgcagctcgctggcgttacgcgctttacccgggtagttgccggtggcctgaataccgccggtcaggcttccttccgggttttcgaaaccgacgacgtcatcgccctgccagcaatgcatggaaacgggcaggcgatccagctggcgcaaggcctcctcgacgtccacgccgacgctggcgtagcgctgtttggcaatttcccaggcttgttcaagttgagtggtcatgcgcaaagctccttggtctgttgtggctgaaactgcgcgacgaagcgggcaatttcactttcaggattgggggtaaaggtggtgagggcgtagttttgccgcaccacctgacggaattcatcgacgttgtgcagctcgtccagggtcatcagctgaatgccgatattgcccagggtggaggcctcaatcgggccggcgaccacggtgatgccgcaggcgtcggcgcacagctggttgagcagttcgttctggcagccgccgccgacaatatgcagctggctgaacggctgaccgcgcagcgccgccagctcgttgagcacccgggcatagagcagcgccaggctgtcaaaaatacagcgcgccagctcggcgtcggtatcgggaaccggctgcccggcttcgcggcaggcggcctggatttccgcgctcatgttgtccgggttgataaagcggtcatcgttgcagtcgatgacgaagcggcaggccggaagcgcagcggtacgcgcgatcagcgctggcaggtcgccgacgttttgctccttgagcacccgctgcagcagccacaggcccataatatttttcagcacccgatagcggccttcggcaccgccttcgttggtgatattggcccttagcgccgcatcgctggtgcagggggttttgctttcaaagcccatcagcgaccaggtgccggaagagagatacgcggcgtttttgctggccagcggcgaggcgataaccgcgctggcggtatcgtggctggcgacggcgaccaccgggatgttattgccctgcgggcaaatccagtggccaataacgttgccgggatgggtcggcgttccgaaccattcgcgcggcgcgccgctccagttcagcagatcttcgtcccagctatcgctgttgatgttgaccagctgcgtggtagtggcgttggtgtattcccagttcatgttaccggtcaggcggaagctaaagtagtccgggatcagcagcgcgtgcgcggcctggctgaccagctccggctgctgttcaaccagcgcgcgcagctgataaagggtattaaacggcagaaactgaataccgctgcggcgatagatctccgcccggcccagctgctcttcggcatggcgcatcaggccctgggtgcgggagtcgcgataggaaaccggcaggccgacgcgctgacccgctttatccagcaggacataatccacgccccaggtatcgatgccgatgctgtcgatcaggatgccctgttcgcagaccttctccagaccgcggcgaatttccccttccaggctatcgagatcccagcagtcgaagccatccaccttttgcaggctattggtaaaacggtgaatttcacgcagcgccagcgtttgctggccgggctgataaccggcgagcatcacccgcccgctggaggcgcctaaatcgacggcgacacaatgacgaaaactcatgggaagatccttgtgaaaatcattgcatacagtctaaaaaagtcgcgtcgggctcaccttcttgttactgacagggaaaattggcctctggcaagaaagcaaaggtgaccgtgagggaggtcacagtttcgttttctccgcgctggggtgagggatgtgatgttgtccgcagttcccgatctttcccgtcatttcttgaaaaagcggcaggctttacgaattttgcggtcaaaaattgaaggccggatcgccgacccttaattactatttgctccactgattgataacttttctcatctcgaggagcggctatgactatgttgcacagtgtggatttctttaagtccggcgtttcagctgtcgccattgagccgcggctcccgcaatccgcttttcctgagcatcaccatgattttcatgagattgttattgtggagcacggcaccgggattcacgttttcaacggccagccctacaccatcagcggcggctcggtctgctttattcgcgatcacgatcgccatctctacgagcacacggataatttatgcctgactaacgtgctctatcgcgcgccggacgcgtttcgctttttgtccggcctgaacgcgctgttgccgcaggagcaggaagggaactacctctcgcactggcgggtgaatcagaatgcgttgcagcaggtgcgccagattgtggagcagatggagaacgttggcgcggatgcggatatgcacgccatcgccagccgcgagattttatttatgcagctgctggtgcacctgcgtaaaagcagcctcgccgaaggggccgccaacaacgacgcgcggctcaaccatttgatggcctggctggaagaccattttgccgaagatatctgctgggaagaggtggcggcgcgcttttcgctctccttgcgaaccctgcatcgtcagttaaaacagcaaaccgggctgacgccgcagcgctatctgaatcgggtgcggttgatgaaagcgcgccatctgctgcgccatagcgatgatagcgtgaccgatatcgcctatcgctgcggattcggcgacagtaaccacttttcgacgcttttccgccgcgaatttgactggtctccgcgcgatattcgccaggggcgcgacgccattcttcagtaacgggagagcagtcaacgttttgacagacataaacgcgaataatgaaacgttattcacgtccggagttgatgtcgtggcaggtcagctgattcttcgcaaagatgaattttttgcctctcccgctcaggcggtggcggtggcggatcgctatccgcaaaacgtcttcgccgagcacacccatgagttctgcgaactggtgctggtgtggcggggtaacggcctgcacgtcctgaacgatcgcccgtggcgcattacccgcggcgatctgttctatatccgcgcggaagataaacactcctacgcctcggtgaacgatctcgtcctgcaaaacgtcatttattgcccggaccggctgcggcttaactttgactgggcggcgcacattcccggcctgtttggcaccccgtgggttccgcactggcggattggcagcagcggcatggcccaggtcaggcaggtgattacccagctggagcatgaaagcagccgcagcgatgcgcaggccaataatatggccgaactgctgtttgcgcagctggcgcttatacttcagcgctatcgctacgccaccgataatctggcggcgacccaaagcgaagcgctgctcgataagctgctcaccgagctggcgggcagcctcaatcgtcctttctttcttgaccgtttttgcgagcgcgaagggtgcagcgaacgcgcgctgcgccagcagtttcgtcagcagacggggatgaccatcaaccactacctgcgccagctgcgcatctgtcacgcgcagtatctgctgcagcataccgaacggctgattggcgaagtggcgatgcagtgcgggtttgaagacagcaactacttttcggtggtgtttaaccgcgagataggcatgacgccggggcagtggcggcagcgcagtcgcaccgccgcctgacgacgctagttcgccattcccagaccaacgatattggcggcgataataattaccacgcagccgaggctgaggacgcccaccggacgacgaccggcgttgttccactctttcagtatcagacccaccaggccgccgcacagcacgtagaagctcatatgcagcatccagctcatgtagtcgtactgcgccggaatgctggcgtggccccaggcgtagaaaaagaactgcagataccacatcaggccgcctaacgccgaaagcaggatattgctgatgatgagcggttttgccagcgagaagtcggcttttatcgacaggttttttacttttgccagacggataaagcagaagccgaggttgaccagcgcgccgccgcccatgatcaccacatagcttggcagcgcggtgtagagcggatcaacgccgagcgcggcggcggcttcatgcatcggcttggcggcgttcatggcgaacgacataccggccgagaagatgccgcacatcaccgccagcagcagcccctttttcaggttgaagtcttcggctttgatgcccattttgcgctctttcagctggcctgcgcgggtgacgatacccacgccaatcaccgcgaccagcacgccgagcagcgtcatctggccgcctttagtgttaatgagaacatcaaactgaccgttaagaatcggcgtcattaacgtgccgacaatcagcgtgataccaatggcgatgccgatccccatcgacatccccaggtaacgcatcgtcaggccgtagttgatattaccgataccccacatggcgccgaacaggaaaacgggcagcagagtggaggcgttaaaagagccgtaataggcccagaaatcgggcagcagcatggcgctgatggcccaggggaggatcagccaggagacaataccgccgatagaccacatggtttcccaggaccaatgtttaactttcttgaacggggcatagaaacaggctgcactggccgcacctatcaaatgccaaaaaatacccatcgtaatcgcgtgattcattgattttatcctcatctattttttatcggataaatcttcttccgacccgatgagtgtaaaaatcggtcagtttttccgcctttaagctgttgccacccgaagcctgaacctggcaaccaaaaacttaattagttgttctgtatcacaaaacgacatctattacccgttgttataaccttattaaaaatacggcattgataagcgttttcaatatcatttaattaactataatgaaccaactgcttacgcggcattaacactttccgccgctcgacaataatggagatgattatgagttatacactgcctgccctgccgtacgcttatgacgccctggaaccgcattttgacaagcagacgatggaaatccatcacactaaacaccaccagacctacgtaaataacgctaacgcagcgctggaaagcctgcctgaattcgcgagcctgtccgcagaagagctgattaccaaactggatcagctgccggcagacaaaaaaaccgtgttgcgtaacaacgcaggcggccacgctaaccacagcctgttctggaaaggcctgaaaaccggtaccaccctgcagggcgacctgaaagcggctatcgagcgtgatttcggttccgttgacaacttcaaagcggaatttgaaaaagcggcggcgacccgtttcggctccggctgggcgtggctggtgctgaaaggcgacaagctggcggtggtttctaccgctaaccaggactccccgctgatgggcgaagcgatctccggcgcttccggcttcccgattatcggcctggacgtgtgggaacacgcttactacctgaaattccagaaccgccgcccggactacatcaaagcgttctgggacgtggtgaactgggacgaagccgcagcgcgttttgccgccaaaaaataaggttgcattgtgctgagcgagaagcgagtctgatgactcgctttttttatatccgcagcaaaggagcagcgatgcactatccggtgaatgtctttgtgggcaaggtaagggattatgacggcagccgtccaagcgccatcggtaaaattcaggtcgatggtgaactgacccttggcgatttggggctggagggcgatgagcaggcggagaagaaaattcacggcgggccggaccgcgcgctgtgccactatccccgtgaacactacgcccactgggcccgtgagcttccgcagcaggcggatcttttctgcgccccggcgtttggcgaaaatctctcgaccgaagggctgaccgaaaaaaacgtctacattggcgatatcttccgctggggagaggcgctgattcaggtcacccagccgcgatcgccatgcttcaagctcaactatcactttgccgtcagcgatatggcgcagcttatgcaaaacagcggcaaaaccggctggctgtatcgggtggtggcgggcgggcaggtgtccagcgatgcgccgctggcgctggtttcccggctcagcgacgtgagcgttcacgaagcgggcgccatcgcctggcagatgccgtttgatgatgagcagtaccaccgtctgctctccgcggcggggctgtcggtaagctggagccgtaccatgcagaaacggcgcctgagcgggaagatcgaaaataattcgcggagattgtgggggaaatagcgcttccgtgcgcgttcccggatggcggcgcgttgcgccttacccgggctacccgttttgaacccggcccggtgaagccaggccgggaagatcaggtgcgcttgtacagcggcagccagagggttaagcgcaggccgcccagcgggctgtcgtcggccttcacccaaccgcgatgctgttgaatcgccgcctcgacaatcgccagccccaggccggtaccgccagactcgcggtcgcgcgcctcatcggtacggtagaacgggcggaaaatctgctcgcgatcctccggactcacgcccgggccgtcatcatcgacgttcaccgtgatgccgtctttatccactgagaagcttaccgaaattttagtatgcgagtagcgcagcgcgttacgcacgatattctccagcgcgctttccagcgcattggggttaccgtacagaggccacggccccggcggatactcgacggtgaacgatttccccatctgttcggcttcaaaggcggcgttatccagcacctcgccccacagctggttggctttcaccgtttcgctcaccagcgcggttttcgcctgattgcgcgacatcaccagcaggtcgttgatcatgctatccagccggtgcgcttccatctcaatccgctccagctctttgctttccccgctgcggcggcgcagcaatgcggtgcctaactgcaggcgggtcagcggcgtgcgcagttcgtgcgagatatcggacagcagacgatgctggctggacatcatgcgctccagcgcggtcaccatctggttaaaactggtcccggcggctaaaaactcctgcggaccggcttccagttccggatgctgacgcaggttgccctgggcgacttcatcggcggcatttttgagcttacgcgcgggtttcgccaggctccacgccagccatagcagcagcggggcgctgactaacatcgtgacgatcagcagcagtagcggccggtcgaacagcagattgatgaagtctgattgtgacgtattggcaggacgaatcagatagagctggtagttatcttctccatccctgacggaaaaaggcccgaccatttccagacgaccatagcgctttttctgcggatggtcggcgttatccgcttggccgataaagttgcggataatctgcatttcgttgcgttcggcaccgataacgcgaccttcgctggtgaccagcagcaaacgctggcccggcggagcccacttatcgatggcgcgaaacagacgacgccaccacatcaggtcgtttggcggatcgttcgccagttcggcctcgacgtgctgttcaatcatgatgccctgacgttgctcgctctccagcagctcggtcatctggcgcgagtccagcttaggcagcatcagaaccagcatcaacaccagcgccagcgtgagccagaaaatagcgaagatgcgtgcggttaaacttccaatcatgaagccgataccatcagatagccgcgtccgcgcagggttttaaaccacggatggccgtctttgcgctccggcagcttgcgccgcaggttggagatgtgcatatcgatcgcgcgatcgaatggcgtcaggcgtttacccagcacttcctggctaagatgctcacgcgataccacctggccaagatgctgcgccagaagatagagcagggtgaactcggtgccggtcagctccagggtcagaccatcgaagctggcttcctggcggccggggttaaggcttagcgcatccacttccagcgtcggtgaaccggcttcggttgtctgctgctgctcgctccagtgcgaccggcgcagaatcgcgcgtatacgcgccaccagctcacgatcgttgaacggcttaggcaaataatcgtccgcgcccagctcgaggccgagaacgcgatccagctcgctcccgcgggccgttagcatgataaccggggtctggtatgtctgacgcaactctttgagcgtgtcgataccgtttttcttcggcatcatcacatcaagcaaaagtaaatcgatgctgtcgtccagaagggccagcgcctgttccccatcatgggcgacgagcacattaaaaccttccatatcgagcagctcttttaacagggaggtgagctcccggtcatcatctactaacaggattttattcattgtttaaatacctccgaggcagaaattacgtcatcaaggctcgctaatccatgactttacgttgttttacaccccctgacgcatgtttgcagcctgcatcgtaaactctctctcgttgaatcgcgacacaaacgttttgggagtatgtgatgcgcaatgttatcgctgccgtcatggcctcaacgctggcgctaagtgcatatagccaagccgctgaagtcgtcaccagcgttaactggcttcccggagacgaaggggtccagcgcagcagccagagccatatgtttgacggcataagtttaactgaacaccaacggcaacagttacgagatcttatgcagcgggcacgccacgacaggccacccgttaatgttagcgaaatggagacaatgcatcgccttgtcaccgcagaaaattttgatgaaaacgctgtacgcgctcaggcagataagatggcgcaggaacaggttgcccgccaggttgaaatggcaaaagttcgcaaccagatgtatcacctgctaacgccagagcagcaagcggttttaaacgctaagcaccagcaacgaatggatcagttgcgtgaggttgcacggatgcaaaaaggctcagcgatgatgctttcgagtagtagcaataccctgcaaccccagtaacaaccctgttttccttgccatagacaccatccctgtcttcccccacatgatgtgggggtttttttgcccgttattcagcgccctcctggctccccgtcccggtaaaagatcgggttatactaagcgcatcgcgaagtaaggagcgtttatgaatcaatcttatgggcagctggtgagccgcgcggcgattgcggcgacggtgatggcctctgcgttacttttgatcaagatttttgcatggtggtataccgggtctgtgagtattctggcggcgctggttgattcactggtggatatcgccgcctcgttgaccaacctgctggtggtgcgttattcgctgcagcctgccgatgaagaacatacctttggccatggtaaagcggaatcgttggccgcgctggcgcaaagtatgtttgtctccggctcggcgctgtttctgttcttgaccggtattgatcatctcgttcgtcctgagccgatgaatgcggcgggcgtagggatggtggtgacgctgattgcgctggtcagcacgctgctgctggtcacgttccagcgctgggtcgtaagaaaaacacaaagtcaggcggtacgggcggatatgcttcattatcagtctgatgttatgatgaacggcgcaattctggtggcgctggccctctcctggtacggctggcaccgtgctgatgcgctgtttgcattaggtataggcgtctatattttatatagtgcgctgcgcatggcttatgacgccgttcagtcgttgttagaccgtgcgcttcctgatgaggaacgccaggaaattatcaatatcgtgaccgcgtggccaggcgtcagcggggcgcacgatctacgaacgcggcagtcagggccgactcgctttattcagattcatttggaaatggaagataacctcccgctggttcaggcacacgtgattgccgaccaggtggagcaggcgctgttgctccgttttcccgggtccgatgtcattatccaccaggacccctgctctgtggtgccgttagggcggcagggtgttttatgatctttaggttatagtctgtaaactcgatgtaaaagtgtggggcggatcggcattttttgtataaattaccgccatttggtctgacctgaatcaattcagccagaagcgtttgatatactattgcaattatcgttgtgcactcctcgtgaggggcgcttcaggcaacaggattattttttgcttcctaagttcagaggtagtcatgattaagaaaatcggtgtgttgacaagtggcggtgatgccccgggcatgaacgcagcaattcgtggcgttgtgcgtgcggcattaacggaaggtctggaagtttttggaatctatgacggttacctcggcctgtatgaagatcgtatggttcagctcgaccgctacagcgtttccgacatgatcaaccgcggcggcaccttcctggggtcggcgcgttttccagaattccgcgaagaacatattcgcgccgtcgcgattgaaaatatgagaaagcgcggcctggatgcgctggtggttatcggtggtgacggttcctatatgggcgccgtgcgtctgactgagatgggcttcccttgcatcggtctgccgggcaccatcgacaacgatattaaaggcaccgactataccattggcttctttaccgcattgagcaccgtggtagaggccattgaccgcctgcgtgacacctcttcctcccaccagcgtatttccgttgttgaagtaatgggccgctactgcggcgatctgaccctggcggcagctatctccggcggctgtgagttcatcatggtgcctgaggttgaatacacgcgcgacgacctggtttcagaaattaaggcgggtatcgcgaaaggcaaaaaacacgcgattgtggcgatcaccgagcatatgtgcgacgtcgacgagctggctcactacatcgagaaagagaccggccgtgaaacgcgtgccaccgtactgggccacattcagcgcggcggctctccggttccttatgaccgtattctggcatcccgcatgggcgcgtacgcgattgacctgctgctgcagggcttcggcggccgctgcgttggtattcagaacgagaagctggttcaccacgacattatcgacgctatcgaaaacatgaagcgtccgttcaaaagcgactggctggattgcgctaagaagctgtactaagcctccggcggaaataaaaaggccttctcagagagaaggccttttttatgggcgggacgctactcgatatccagggcatcctcggagaggataatcccggtattatcggcgtagagatggtcgccggaaaagaaggtgacgccgccgaagttgacgcgcacgtcgctttcgccgataccttcacctgcggccccgacggggatagccgccagcgcctggatgccgatatccagctcttccagatcgtcaacctgacgcaccgcgccatagacgaccagcccttcccactcgttttgtactgccagacgcgccaggtcagcgtcaatcaatgcgcgtcgaacggaaccaccgccgtcaaccaacaggacatggccacggccgttctgttcgagcatatcgtagagcaacccgttatcctcgaaacattttaccgtgatgatttgtccaccaaacgacgagcgccccccaaagttggagaacagaggttccacgacgttgacatcctcctggtagatgtcacaaagctcggaagtatcgtatttcataggcttaacgttcagttgctgcgagaattttcagtatatcgcgtgaatcgtactgttggcaaaatcatcaattgttaattgatatttgtcagttaacccacaagccggctgcaaataattccgataacaaacagcaggttggtcagcagcgcccctttaaccgttctttcgagcattggacgcatggcgacagggtcgcgttcgcgcatcacataacgcgcctgtttgaccagcagcggcgttgccagcaggaacagccaaccccacggattatgcagcgagagaaggttaaacagcgccaggcacagcggcgcgccaaacagcaggcaggcgtggtagcggcgagcgttaaccggccccaggcgcacggcgagggtgtttttaccgttttcacgatcgctgtcgatatcacgcaggttgttaatattcagcaccgccgttgccagcaggccgcaggcggtggcgggtaagaaaataaccgcttcaacgctgtgcgcctggaggtaccagctcccgacgacgctaagccagccgaagaacaccagcacggagatatcgccaaggccgatgtagccgtaaggacgagtgccgacggtgtaggtaatggcggccacgatcgatagcccgccaagcaccataaaaccgataaaatcggccatggtctgccaggccaggaacagcagcgccaggccagaaaggcaaatcagcgctacggtgagtatcaacgcgcgtttcatctgcgcctgggtaattgcccctttctgcatgccgcgaagggggccgatacggtcgggcttatcgctgccttttaccgcgtcgccataatcattggccagattggagaggatttgtaataaaccggcggtgatgatggccagcagggcaacccagggatcgaagctgccctgatgccaggcaagcgcggagccgacaataatggcggcaaaggccagaggtaacgttttggggcgcaggctttccagccaggcctgggtgcgagtgatagcgtgttcggtcataagtcccggccaataaaaaatggggctctacccttcatacttcaagctgcagatgcgttggcgacgcgcattcaccccaggcactgccgggataaatgagggccctcagccaacggctgccttcccacaactcgaattatttagggtatctatagccccatctatagtgatgaaaatatattgaaccggattataagataaaacggctcaggtcttcatctgccaccagaacatccagatgcttaccgacatattccgcatcgatggtgacggtttggccattcatttcgctggcatcgtaggagatgtcttcgatcagacgctccagtacggtatgcagacgacgcgcaccgatgttctcggtggtctcgttgacctgccacgcggcctgagcgatacgcttgatgccatcttccgtgaactcgatattgacgccttcggtggccatcagcgctttatactgcacggtgatggacgcgttcggctcggtcaggatgcgctcgaagtcgtgggtggtgagcgctttcagctcaacgcgaatcggcagacgaccctgcagctccgggattaagtcagacgggctggctacctggaacgcgccggaagcgataaacagaatatgatcggttttcaccatgccgtgcttggtggagacggtgcagccttcaaccagcggcagcagatcgcgctgtacgccttcgcgggatacgtccgggccggaggagttgccgccgcgcttacagattttatcgatttcgtcgataaacacgataccgtgctgctcaacggcgtcgatggcatcctgcttcagctcttccgggttgaccagcttcgccgcttcttcttcaatcagcagcttcatcgcgtctttaattttcagcttacgcggtttttgcttctggccgcccaggttctggaacatggactgcagctggctggtcatctcttccatgcccggaggggacatgatttcaacgcccatcggcgcagcagcgagatcgatctcaatctctttatcatcgagctgaccttcgcgcagttttttacggaaagactgacgcgcggcggacggttcctgaggctgttcagcctggccccagttgtttttcgccggcgggatcagcacgtcaaggatgcgctcttccgccagttcttccgcacgatagcggtttttgtcgatggactgcatgcgcaccattttgatcgccgcatcggtcagatcgcggatgatggagtccacttctttaccaacatagcccacttcggtgaatttcgtcgcttcaactttgatgaacggcgcgttggcaagctttgccagacgacgggcgatttccgttttaccgacgccggtcgggccgatcatcagaatgtttttaggcgtgacttcgtgacgcagctcttcgttgagctgcatacgacgccagcggttacgcagagcgatggcgacggagcgcttggctgcgtcctggccgataatgtgtttgtccagttcgctgacaatttcgcgtggggtcatttcagacatgggagatccttacgctttagacggtaattcttcgatggtatggaagtggttggtataaatgcagatatcacctgcaatattcaacgctttctctgcgatatcgcgtgcgcccatatcggtattttccagcagggcgcgagccgcggcctgggcgtaaggaccgccggagccgatagcaatcaaatcgttttctggctgcaccacgtcaccgttaccggtgatgataagcgatgcgttttcgtcagccacggccagcagcgcttccagcttgcgcagcatgcggtcggtacgccagtctttcgccagctcaacggcggcctttaccaggtggccctgatgcatttccagcttacgttcaaacagttcgaacagcgtgaaggcgtcagcggtgccgcccgcaaagccggcgatcactttgtcgttgtacaggcggcgcacttttttgacgttgcctttcattacggtgttgcccagcgtggcctggccatcaccggcaataacgacatggccgttacggcgaacacttacaattgtagtcacgagcagaccccttggttgcaaaagcggaataggggccccgcggttacgcggggcagaatgcaattatagatgggggggattttgagggtttcaacccctggcggcgagacgaatgcagtttgcgtgtccggccattttcagccgttcaatcatattgctggcgttttctttgcctttcagcggcccaattaccacgcggttccagccgttattggtggtgatgtgcgaggcgaagccttcaaacgccagctgcgcgcgtacggtttccgcctgctcagcgcctttaaaggagccgcactggatcatccagctgcgatcgtcttttttctccgcggcggcggtttttggcgcctcttcaacgcgggttaccggcgcggcggcctgggttttaggctgcgcggtactggtatgcgccggcgtttgcagcagatcctgatacggctgctggttcgacgccgtttgcttcggcggctgctgcaccggtttcggctgctcgacggcccgcggctgggttcgcggttgctgtacctgcgtctgtgtctgctgctgcacctgcgcgagctgctgctgctgaactaaacgctgacgctgcagggtctgctggcgctgcgccggggtttgttcattccacggcacttcggtcagctgcgtaggctgctgacgcatatcggcctgcatttgcgccaacagctggcgctgctcgtccgtcagctgctccggcttcatgacttcgccgcctgccgtgggttccgtaggcgcacgaacgccgggctgacggctctccagctctttaatatagcgccagcgctcttccggcttcggcgggaggccgttgccagcggcctggcgattttgcagcgcttcagcctcttctttcttgtggtgcgtgatgaagtacagtccaccgataaaggccaccagcactgccgcagcgatcgccaccatagtcggtgaaaccgccgaaaggccgccttgcttgttccttgagcttcgggtattgctctttttgcgccgcgaagaagccggttggctgcggcgtacataatctcgttgtgccactatcgtttcgctgtcttattcgtttttcagcccgccatgttacttaagcggcgggcctttgaccagaagggcaggcccgaaagcctgaaggttatgttcggatttttcgcgtactgccgcgaacgataagctcgcagtcgagtaatcgtgaaccgctgctgacgctgtgaccgtgcagttgatccaataaaagcagcatcgcttcgcggccaatatcaaaacgtggttgcgcgacggtcgtcaatggcggatcgcaaaattcagacaaagagatgttatcgaaaccaataatagacagatcttcaggaactttcaggccgcgacgtttcgccagcgataatgcccccagcgccataatatcgctatggcagaaaacagccgtcggcggtaccggcagcgccagcagctgttcgagggcgttggcgccggcttcataggtaaaattgccgcgggcgatatagtgcggatcgacggttatcccgctacgacgcagcgcctggacatagccctgcaggcgataatggcacagcggcatctcttccgggccggcgatacagccgatgcggcgatgccccagctcgtgcagatagttaacggcgttaaaggcggcggtgaggttatcgatatgcaccgtcggcagctcaagctcgggagcgaattcattggccatgaccatcggcggcagattgcgctgctcctctacgcccgcatcgaagggcaaacgggagccaagcagcagcataccgtcgatctgcttggtaatgatcaggtcgataaaggtcttttcctgacggttctggtgggcgcaatcgccaatcagcaccaggtactcctgttccgccgcggtgacttcaataccgcgaataatctcgctgaaaaaggggtcgcagatatccggcacaatcaccagaatggtgcgtgactcgttgcgcttcatattgcgcccgagcgattgcggtaaatagccgacttccagcgcggcctgctcgacccggttacgggtgctctgcgaaaccttatcgggattcattaacgctcgggatacggttgccgtggaaacgtttgccttttgggcaacgtctttcatagtggcggcaacgacctgttttttgggcttcacctgatttctcctcgctgactggcgcagacacatccctggcgttctgacatcagcaacatttttaacagatagtacatccagagagttacagaattttcatgaaaaacgtgacgatggttgaatttttcgatccgcctcgcaagagaagccttaaccttcaataggatcgacgtccagaacccatttcacttttcgcgcttccggcagcgtgttaatcaacgccagcgttccgctgacgatatgctgtagctgaacgcgcgacggatgctggaggagaatttgccagcgccagcggccgccacgctttggcgccagcgccggaaccggcccgagcacccacagtttcttatcggccagcgggctggcctgcagcaggttgcgcagctgttgtaaaaaaagcggcgcctgctggttgttatgatcctcggcgcgaatcagcacgtggctggtccacggcggcagctgcatgctttgccgttccgccagcgcctgctcggcaaacgcgtcgtatcctttataaagcagcgtttgcaacagcgggtgttccgggtggtgggtctgcaggatcacctcgccctgtttgcccgcccggcctgcgcggcctgaaacctgcgtgtagagctgagcgaagcgctccgccgagcggaaatcggcggaaaacagcgcgccgtcaacgtccagcagggaaaccagggtgacatccgggaagtggtgccccttcgccagcatttgggtgccgataagaatgcgcgcgccgccgcgattgacgtcggcaagatattgctcaagcgcgcctttgcggctggtggtatcccggtcgatacgggaaatcgggatagcgggaaacagcggtcccagcgcctgctcaagctgttcggtccccaaacctaccggtaccagatgcgttgagccgcaggaggggcactggcgcggaatcgggcgctggctgtcgcagtggtggcagcgcagatgatgctgagcctggtgcagcgtgtagtagctgtcgcagcgcggacactccgctatccagccgcagtcgtggcacagcagcgccggcgcgaagccgcggcggttcaaaaacagaatcacctggttatcggcctgcagatgctggcgcatgcggccaatgagcgccggagacagtccggcctgcagctgctggccctttaaatccagaacgtgctgctgagccgggcgcgcattgcccgctcgtttagtgagcttcagctggcgatacttgccctggcggacgttatgaagcgtctccagcgccggggtcgccgagccgaggataattggaatttgttcgctgtgggcgcgccagaccgccagatcgcgggcgtgatagcgccagccttcctgctgtttataagagctgtcgtgctcttcatcgatgacgatgaccccgaggtctttaaaaggggtaaatagcgacgagcgggtaccgatcacaatcgccgcttcgccgtttttggcttttagccacgcggagaggcgttcgctgtcgttcagtccggagtgcagcacttccaccggggcgctaaagcggtggcggaaacgggcgatagtctgcggcgtcaggccgatctccggcaccatcaccagcgcctggcgcccctgcgccagtacgttttcaaggacgctcagatacacttccgttttgcccgaaccggtgatcccggccagcagccaggcggaaaagctgtccgaggcgctgtgaatcgcgcccacggcggtggcctgttcggtattgagccgcaggcgctcgccgggtaccgagaagcccgtgcgccagtcggcgatcgcgggcgcttcgctggcgagttcggccaggcctttaccccgcagcgcctgcagggcggcgtcgttaaattcgagttcggcaacctgatggcgccagatcttgccctgacgcagcgcagccagcgcctgctgctgtttcggtgagcgcttaaggctgttgatatcaaccgcttgcccctgttcggtggcaaaccagtaccacattggcgccgcgctggcgggcttcccctggcgcagcacgatcggtagcgcgtgaaacagcacatcgccgatgggatgatggtagtaatccgccgcccacagcagcagccgccagaccgaagcggagaagaccggctcggcgtcgagggcttcggccaccggcttaagttcgtcgagcggcagttcgctgcgctcactgaccgccgttacgatacctatccgctcctgcttgccgaacggaacgcgcacgcgacagcccgctttgaccggcataccgtcaggcagcaaatagtcaaaagtgcggggcagcggaacgggcagggcaacgtgagcgacgggcatttaatcttcctgacttgaaatctggcgggttagtatacacattgtgataagggctcgcggatcagtttgcatatgctggtcaaattctgtatgattcgccgcctttgatgcgctttgtgcgacatcaaaatctattacccggtagtgtaatcgctccgggaattattaacatcgcgtggtgtctggcgttagggctggaagagcgacgcggccttaactgaggttctcccatgaaaaaagatattcatccgaaatacgaagaagttactgcttcctgctcttgcggtaacgtcatgaaaatccgttctaccgtaggtcacgacctgaacctcgacgtgtgcggtaaatgccacccgttctacactggcaaacagcgtgatgttgctaccggtggccgtgttgaccgcttcaacaagcgcttcagcgtaccgggtaccagcaagtaatttgctgaagaagccgcctcagggcggcttttttgtttctcttgcgctaaacgcgagaaaaaagggcagaagatttcttctgcccttttttatggttttagtattcccacgtatccgggtcgatgcccagttcgcgcataatctctttcgccgcttccgggatttcatcgctgcgctctttacgcaggtcttcatcgttaggcaacggttgaccggtaaaggcatgcaggaacgcttcgcacagcagttcgctgttagtcgcgtgccgcaggttattcacctgacgacgcgtgcgttcatcggtgaggatttttaacaccttcagaggaatggaaaccgtaattttttttacttgctcactcttcttaccgtgctcagcgtatgggctgatatattcgccgctccattcagccatgagttacctttaatcctctattcattagttaagggcctgaacgcgagtcctggccataattgcgcgtagtttaccgtagaggggcgcgtctggcaccaaacaagccgctacggatgtgcgctaatgcatataattttaacggctatttccagtttgctcaatctatacgcaaagaagtttagatgtccagatgtattgacgtctattataacaatgattactctgaagcctgacttttcaccgactcagcccaggaactccccaacatgacgcgtaaacaggccaccatcgcagtgcgtagcggtttaaatgacgacgagcagtacggttgcgttgtcccgcccattcatctctccagcacctataatttcaccggatttaacgaacctcgcgcccacgactactctcgtcgcggtaacccgacccgtgatgtggtgcagcgtgcgctggcggagctggagggcggcgcgggggcggttctgaccaataccggcatgtcggccattttgctggtcaccaccgtatttctgaaaccgggcgatctgctggtggcgccgcacgactgctacggcggcagctaccgcctgtttgacagcctggcgaagcgcggctgctatcgcgtgctgtttgtcgatcaaaacgacgagcaggcgctgagcgccgcgctggcggaaaaaccgaagctggttctggtcgaaagcccaagtaatccattgctgagagttgtggatattgcgaaaatctgcggtctggcgcgtgaggccggagcggtcagcgtggttgataacaccttcctgagcccggctttgcagaatccgctggcgctgggcgccgatctggtgttgcattcgtgcactaaatatttgaacggccactctgacgtcgtggccggggtggtgatcgctaaagatccggcgaccgtcaccgaactggcatggtgggcgaataatatcggcgtcaccggcggagcgtttgatagctatctgctgctgcgcggcttacgtacgctctctccgcgtatggaagtggcgcagcgtaacgcgctggcgattgtcgactatctgaaatcccagccgctggtgaaaaaactgtaccatccgtccctgccggaaaaccaggggcatgagattgcggcgcgtcagcaaaaaggttttggggcgatgttaagcttcgaactggatggcgatgagcagacgctgcgtcgtttcctgagcgggttatcgctgtttacgctggcggaatcgctgggcggcgtggaaagtctgatttcccacgcagcgacgatgacccatgcgggcatggcgcctgaggcgcgtgcggccgccgggatctcagaaacgcttctgcgtatttcgaccggtattgaagatggtgaagatttaattgccgacctggaaaatggcttccgggcagcaaacgaggaataaacatgagtgtgattgcgcaggcaggggcgaagggtcgtcagctgcacaaatttggtgggagtagtttagcggatgcgaaatgttacctgcgcgtcgcgggtattatgacggagtattcgcaggcgggcgacatgatggtcgtctctgccgccggcagtaccaccaaccagttgatcagctggctgaagctcagccagaccgatcgcctttctgcgcatcaggtgcaacaatcgctccgtcgttatcagatggagctcatctccggactgctgtcaccagacgctgccgacacgctgattgccatctttattcaggatcttgagcgccttgccgggttgcttgacggcggcgtcaccgacgcggtatacgccgaagtcgtcggtcacggcgaagtctggtcggcccgcctgatggcggcggtgctgaaccatcttggcgtagaagccgcctggctggatgcgcgtagcttcctgcgcgccgagcgctccgcgcagccgcaggtggatgaaggtttatcctatccgcttttgcagcagctgatagcgcagcacccgaacaagcgtctggtggtgaccggctttatttcgcgtaacaacgccggggaaaccgtcctgctggggcgtaacggttccgactattccgccacccaaatcggcgccctggccggggcgtctcgcgtcactatctggagcgacgtggccggggtctacagcgcggatccgcgtaaagtgaaagacgcctgcctgctgccgctgctgcgcctggatgaggccagcgaactggcccgcctggcggcgccggtgctgcatgcccgtacgctgcagccggtctccggcagcgatatcgatttacaattacgctgtagctacaccccggatcagggctcaacgcgcatcgaacgcgtgctggcttccggtaccggggcgcgtatcgtgaccagccatgatgatgtctgcctgattgagttccaggtacccggcggccaggatttcaaactggcgcataaagagctggacgctatcttaaaacgcgcccagctgcgtccgctggcggttggcgtacacgccgaccgtaagctgctgcagttctgctacacctctgaagtggccgacagcgcgctgaagctgctggacgaagcggggctgccgggcgagctgcgcctgcgtcagaaactggcgctggtggcgatggttggcgctggcgtgacccgcaatccgctgcactgccaccgtttctggcagcagctgaagggtcagccggtagagtttacctggcaatcagaagagggcatcagcctggtcgcggtgctgcgcgccgggccgacggaaagtcttattcaggggctgcatcagtcgttgttccgcgcggaaaaacgcattggcctggtgctgtttggcaaaggtaatatcgggtcccgctggctggagctgttcgctcgcgagcagaccacgctttccgcccgcaccgggtttgaattcatccttgccggggtcgtggatagtcgccgtagcctgcttaattacgaaggccttgacgccagtcgcgcgctggctttctttaatgatgaggccgttgagcaggatgaagagtcgctgttcctgtggatgcgcgcgcatccgtacgatgatttagtggtgctggacgtaaccgccagcgcgcagctggccgaccagtacctcgatttcgccagccatggtttccacgttatcagcgcgaataagctggctggcgccagcagcagcagtaagtatcgccagatccacgacgcgttcgagaagaccgggcgccactggctgtacaacgccaccgtcggcgccggtttaccggtcaaccatacggtgcgcgatttgattgatagcggcgataccattctggcgctgagcggtattttctccggcaccctctcatggctgttcctgcagtttgacggcaccgtgccgtttacagacctcgtcgatcaggcctggcagcaggggctgacggaaccggacccgcgcgtcgatctctccgggaaagacgttatgcgtaagctggtgatcctggcccgtgaggcgggttacaacatcgagccggatcaggtgcgcgttgagtcgctggtgcccgcccactgcgaagaggggtctgtcgatcacttctttgagaacggcgaagcgctgaacgagcagatgctgcagcgtctggaagcggcgcgcgagatgggcctggtgctgcgctacgtcgcgcgctttgatgctaacggtaaagcccgcgtcggcgtggaagcggtgcgcgaagagcacccgctggcggcgctgctgccgtgtgataacgtctttgctatcgagagccgctggtatcgcgataacccgctggtgatccgcggtccgggcgccggtcgcgatgtgaccgccggggcgattcagtcggatatcaaccgtctggcgcagctgctgtagccataagtcaaagaccaggcaacgcctggtcttttcaccttagtgcgccgcgaagacttctttggcggcaaacaggccattcagggccgccgggaatccggcatagaccgccatctgcatgatcacttccgtaatctcttcctgcgtcagcccgacatttaacccggcggcaatatgcacttttagctgcggcgcggcattgccgagcgccgtgagcgcggcgatagtggcaatttcacggctgcgtaaatcgagccctggcctggcgtaaatatcgccgaaggggaactcaatcagatagcgggcaaaatcgggggcgatatccttcaggctgttgacgacggcgtcgccgcctttgccgtccacgcgctgtagcatttctcgtccgatggtataacgttcgctggtcatggcttttcctcagtgtgatgatgcgtaatgaggaaggttagggaagttttcctgacttgagtaatacccttttcgtgataccttttcagtatgacaaattcacgtttacacactctggatattcgcctgctgcgctactttgcggtggtggcggaggaaaataacatcagccgggccgcgcagcggctatttatttcgcagccgccgctgagccgtcatattcgccatctggaaacgcagctgggggtaacgctattcttgcggcataccaaaggtctgatccttaccgacgagggaagacgggtgctggatatcattcggcctctgctggcgcttcaggatcgcaccctggcggcgttgagccagctctctgcgcccgcgcagcagcctctgcgtctggggttgaccaccgcctttgagcaaggcgttttcgccgccgcggaatccgctctgggtgagtacaccggcgcattgcacatcactcgtcagtcatcaccggcgttggcccaactggtgcgaaagggcaagctcgatgcggcgctggtggcgctgccgctgaataccgaggggcttcacctgcatccgttgccgtatggcgagccgcttatcgcggcgctacccgcatcctggccggaggccgccagggcggagctgacgttaagcgcactcaatcatcggccgctgttctggtttccacgcgagcgtaatcccgatttttttgactatacgcgacgtatttttgaccgggcaggctatgtgcccacctacgtggaggagcctgccgagcatgatgttctgctggcgcggattgcgcgcggagaaggcctgatcctcctgccggcctctttttccgcgattcagcggcagggggtcgtcttttgtcctttgcaggatgccagccagcagcttccgcttaggctgggaatggtgacgctgcccgcaaatgagagggtccgggaaagggtaacagcagtcgttgaaaaatcattgccttagcgaaaaagagatgaattaatttcatcctggctgaatattcctcactgtttacgctgatttttctattgacgcggatgcccttttccgtcatttttacatctggacgtctaaacgtatagaagttcgcgacacaacaaacaataaaatgcgattgatgaggtaaggtatgagcttttttcacgccaatcagcgggaagccctgaatcagagcctggcggaagtgcagggccagattaacgtctcctttgaattctttccgccgcgtaccagtgaaatggagcaaaccctctggaaatccatcgatcgcctgagcagcctgaagccgaagtttgtctccgtgacctacggcgctaactccggtgaacgtgaccgcacccatagcattatcaaaggtattaaagagcgtaccggtctggaagccgccccgcatctgacctgtatcgatgccagccgcgatgagctgcgtaccattgctaaagattactgggatagcggaattcgccatatcgttgcgctgcgtggcgacctgccgcctggcagcggtaagccggatatgtacgcggccgacctggtgactctgctgaaagaggtcggggactttgatatttccgttgcggcttatccggaagtccatccggaagccaaaagcgcgcaggccgatctgcttaacctgaagcgcaaggtcgaagccggagcaaatcgcgcgattacccagtttttctttgatgttgaaagctacctgcgttttcgcgaccgctgcgtctctgcgggtatcgacgtcgaaattattccgggcattctgccggtctctaacttcaggcaggcgaaaaaatttgccgatatgaccaacgtgcgtatcccgacgtggatggcgaaaatgttcgaaggtctggacaatgacgccgaaacccgccagctggtgggggcgaacatcgctatggatatggtgaagattctcagccgcgaaggggtgaaggatttccatttctataccctgaaccgcgcggaaatgagctacgcgatttgccacactttaggcgtgcgcccggcgtaagcaggcttcagatttccccgtccttctcttctctctgcggcgtcaaaacatcttcggcgccgcttgttctggttatttccttaaaacatcttttctggcggtaaaacggggcgcctgcgccatcagaggtgactatccgccagcagcagcggtacgttttgcgtttgcatcagagagaggatatcgggggagaggccggtctggctgataacgaggtcaaggtctgccaggcgggcatggcctgcaaggaacgtttgaccaaatttactgctgtccgccagcaggattttttgccgcccggcgcgcatcagcgcttgtttgacgtgggcatcggtcatttcaggaaccgtcagctctccaagatcgttgacgccctgagtgctgaggaagactttgtcggcgtggatatgacgaaagaagtcggcggtactgaaagagaccattccctggctggcgtcttcatattcaccgggcgcgacgatcaacttgatattttttcttcctttcaggagattaaccaccggaatggagttggttatcaccatgattttcttatcgaaaataaaatgagcgagcgccaacggcgtggtgccgcagtcgataataatcgtgtcgccatcttcaacctgctcggcggctttctggccaatcaggtgcttatcatcggccatttgtatcgattgcagctgaaagccgggctcgacgctggcgccgcgggttaagtaggctccaccgtaggttgtttttacaatgccttgtttttcaaagaaagagagatcgcgacggatggtcattttggtgacgccgaacttttcggcgaggtcattgacgacgacttttttgtcctgttgcaaaatggcgtaaatgctcattcttcgatttgatgactgcatatctacgattcacccaaaggaaaatcgcactataaaatacatcgttttggcgggcaatggtgggcgaaaagaacatacccgcctgctggcgggtatgtcgcgaggggttattcccactcttgcaggaagcgttgaccgtactggtcggccaccagaagcgcggcatagacctgatccggcgtcgcgccgccgggcatattgtggatggtttcaccttccgcgcaggcggcttccgccacggtacgcattttgcccgggatatcgactttaatatccagctgcgccagggtgataggcagcccgacgctatggcacagcgccgctacggtttcgatctcttccaccggcgcgttttccagtaccagctgcgtaagcgtaccgaaagccactttttcaccatgatagtagtggtgagcgtccggaatagcggtcagaccgttatggatagcgtgcgcagccgccaggccgccgctttcaaagccgacgccgctcagataggtgttggcttcaatcacccgttccagcgccggcgtcaccacgtgctgctccgccgccagcatcgctttttcgccctcttcaaccagcgtgttgtagcacagttcagccagcgccagcgccgcctgggtgcattttccgcccgccatggtggtcgcgccgctgcgggagcaggcacgcgcttcaaaccaggtcgccagcgcatcaccgataccggctgccagcaggcgcgccggggcgccagcaacgatttgcgtatcgacaatgaccatgttcgggttgcgcggcagcatcaggtagctatcaaactcgccgtcatcggtatagatgaccgagagcgcgctgcacggcgcgtcggtggaggcaatcgtcggggcaataaccaccggcagattcataaagtgtgctaatgcttttgcggtatccagcgtcttgccgccgccgatacccagcacggcggtgcagcgggcggaaccggcaatatcacgcaagcggttgatttcgttatgtgagcattcgccgccaaacggtgcgatttcgccagccagccccgcatccgccaggcttttacgcagtttttcttcggcaaaaccgagtacgaatttatcgcccacgatgagccagcgttctgccagcggctttaggtatccaccaaggcgggtaatgacgtccgcgccctgaatgtacttaccgggtgattgaataatgcgatccatttctattcctcctggatgaccgtgatgccaccctctgggcagctcgccgatcgggttacaggtttagcgttccaaaggcgttattccagtcctgctcaaacttctcaatagctgactctaccgcaggggtaccgagcatttgttgcgctacatctaacggaagggtgatcgcttcgcagcctgctaacaggcaatccagcgcctggcgcggcgtcttaaagctggcggccagcactttgctttccggcgcatgcagctccagcagggactgtagctcctggaccatgcggatgccgtcaccgccctgggcgtcgacgcggttgacgtacggcgccacatattttgccccggccagcgcggccagcaggccctgagatgcgctgtataccgctgtacccagcgtggggataccttcttttttcaacagcttgatagcggcaaggccttcggcggtgaccgggatttttaccacgataccggggacggcgttgctcaggcgtttggcttcttccaccatgccctgcgcgtcgcggctcatggtctgggcgaacagaataccttccggaccgacggctttttgcaggcgcggaagaacatcccaaaccggcgttttaccggctgcgataatgctcgggttggtggtcacgcctgccagcgggtagatgcgcgccaggcgttcaacttctgctacgtttgcggtgtccagatagagttccatgatgctttcctcaatgcttaattcggtagtgtcgttgaggaaagaatacggctttcacgcgaagggtcgccagatgacaaatttgccaaaaactggataaatgtacgcattgcggttaaggatgatttagatcacatttatcccgcaacccggattaaaatgggaaaacaagaacgcacaaaagtcaggtttaacacacaaaaatctagttttttagcgaagccgttttttccgtcagctggctgtgatactgacggcgatactccgacggcgagcgctcggtgtttttgcgaaacaggcggcagaagtagttgctgtcggcgaaaccacaggcgtgggcgatatctttcactttcatatcgtggccttttaacagcattctggcctgctccagacggatgtgattcaggtattcgttaaagcccattggcccgcatttctggaacaaatgggaaagatagtttggtgagagataaaacgcctgcgccaccgactcgcgggttaacgggtcggcaaaatgggtatcaatatgtttacgaatcgcttcaaaaagcgcctggctgcgcgatgacgtttgtacctggctgcccagcagatcggcacagtggctgagcaggctggtgacaatacagcgggccgtgtgctgttcctgcggctgcatctgcatttcattcagcgcctgcagcagaaacgatccaacccgggggccgcggcgaggaacctgctgtttatccagcacgttaagcgcgctgccgtcccagtggcgtaggacgaattccagctgctgcttaccaaacaagacagttaacagcgtggagggcatcagccactgcgggtcattccatccgcctgcggggacgtacagcacatcgtgcggcgtcagctgcgcctggtcggccttaatcgccggatcgcgaagctggcccgcaagcatgatttcgaggcgcggaaaatcgacgcttagcgctttctcagaagccggcctggattctgtggaaaagtggactttgccgattaccgccgggcctttaataaaagaatcaatggcctgattaatgtcgctatccattctctctccgcgttgcgcgatcccgtttcatcatacctaacaaactggcagagggaaaagccgcgcgatttttctgcgaagagagttgtaagatttgattgatatgttatatcgtaacatattattgcaaaccttaactcaggagagagtgatgacccgaaagatttccgcacttatgcttggtattagcctggtactggcgaacagtcaggcggttgcccacggccaccatagccatggcccggcgctgaccgaagccgagcagaaggcgagtgaaggcatttttgccgaccaggacgtaaaggacagggcgctgagcgactgggagggtatctggcagtcggttaatccctatctgctgaacggcgatttagatgccgtgctggagcagaaggccaaaaaagccggtaaaagcgtggcggaatatcgggagtactataagaagggctatgccaccgatgtggagcagattggtatcgaagataacgtcatggagtttcacatcggaacaaccgtcaatgcctgtaagtacgcctattccggctacaaaatcctgacctacgcatccggtaaaaaaggcgtgcgctacctctttgaatgccagcaggcggattcaaaagcgccgaagtttgttcagtttagcgatcacaccatcgcgccgcgcaagtcccaacatttccatatctttatgggcaatgagtcccaggaagcgctgctgaaagagatggataactggccaacctactatccttatgcgctgcataaagagcagattgtcgacgaaatgctgcaccactaataaaaaagctccggtaaacgcgatgcttaccggagctatggtttttaacccggctcgcgctacgcttagccgggctacaggtttctcaaggcgaactagccggtgttacgcatgcctgccgcaacgcctgcgatggtgaccatcagcgcttgctcaacgcgcgggtccggtttttcacctttctcttccgccagacgtgaacgatggagcagctcggcctggagcacgttcagcgggtcggtatagatattacgtagctggatggactccgcgatccacggcaggtcggccatcaggtgggagtcgttggcgattgccagtaccacgttgatatcggcggacagcagttcacgcagctcttcgcccagcttccacagttccggtttcaccagacgctgatcgtaatattccgccagccacaggtcggcttttgagtagaccatttccagcatgccgaggcgggtagagaagaacggccagtcgcggcacatgctttccagctcgctctgcttgccgccttcaacgactttttgcagcgcggcgccggcgcccagccaggctggcagcatcaggcggttttgcgtccacgcaaagatccacggaatggcgcgcagcgactcgacgccgccggtcgggcgacgtttggccggacgcgagcccagcggcagtttgcccagctcctgctccggcgtcgcggaacggaagtaaggaacaaaatctttattttcacgcacgtagccgcgatacatctcgcaggagacgtcggacagctcggccatgatgtcgcgccattgcgcttttggctccggcggcggcagcaggttggcttccagaatcgcgctggtgtagagcgacaggctgctgatggtgacttccggcaggccatatttaaagcggatcatctcgccctgttcggtaacgcgcaggccgcctttcaggcttcccggaggctgagagagcagggccgcgtgcgccggggcgccgccgcggccgatagaaccgccgcgaccgtggaacagcgtcagctcaatgccggctttttcacaggtcttaattaacgcgtcctgcgcctgatactgcgcccaggaggcggccatcacgcccgcatctttcgccgagtcggaatagccgatcatgaccatctgcttgccctggataaagccgcgataccagtcgatattcagcagctgggtcataacgtcgtcggcgttattcaggtcgtccagcgtttcgaacagcggggcgaccggcagcgcgaagccgatgccggcctctttcaacagcagatgcacggccaggacgtctgatggcgttttggccatcgaaatcacgtaggccgcaatagagccgcgcggcgcttcggagatgactttgcacgtctcgagcacttcgcgcgtttcttcgcttggctcccactggcgcggcagcagaggacgcttggagttcagttcgcggatcaggaaggcctgtttatcggcttctgaccagctttcatagtcgccgatgccgagatagcgggtcatttcgcccagcgcttcggtgtggcgggtgctttcctgacggatatcgatacgcaccagcggtacgccaaaggcttttacgcggcgcagggtatcgagcagctcgccgttggcgataatgcccataccgcaggcttgtagcgactggtaacaggcgtaaagcggttcccacagctgctcgttttgcgtgataaggcccgccggtttcggcagtttctgtcctttcaggcgcgcttccagccaggcctgagtctccatcagctgcgtgcgcagttttttcatcaggtaacgatagggttcctgagcgccttccgcgcctgccagctcacgcagctcgtcggtgcactcaaccatcgacagctcggaaatcagcagctggacatctttcaggaacagatcggttgccttccagcggctgagcagcaggacgtggcgggtaatgtcggcggtcacgttcgggttgccgtcgcggtcgccgcccatccaggacgtaaagcgaaccggaacaaaatcgaccggcagccgatagttcaggttatcttccagctgttcattcagctcgcgcaggtagttcggtacgccttcccacaggctattttcgacaaccgcgaagccccatttggcttcatccaccggggtagggcgatgcttgcggatttcatcggtgtgccacgactgggcaatcagctggcgcagacggcgcatgacctgatgacgttcatagtccgcaatgtcgttgttatcgagctgcttcaggcagctgttgatctcgcccatcttgtggatcagcgtacgacgcgtgatttcggtcggatgcgcggtcagcaccagctccagcgacagggattcaacggcttgtttaataatcgtttcgttgagattgggttgctctttgagctttctcagggtgcgggcaatcacttccggattactggccgcttcgccttttggcgaaatgctgtggtattgctcagcggtattcgccaggttcagaaactggctaaaggcgcgcgccaccggcagcagctcgtcgttggacaagttttgcagcgtggtgagcagctcctggcggttggcttcattgccagcgcgagaagatttggacaacttacggatagtttcgacacgatcaagaatgttttctcccagcgcatccttgatggtatcgcccagcaccttaccgagcatactgacattactacgcaaagcggaatattgttcgttcatgttaccccagacaccccatctcattttattttgttatatccggcgctcgataatttgagcagtggataagcaaccgtctttataaagccacgtaaaaacccccacgtcaattgttgcgaaatcgcttcagcaaacgaataaatggcggcaatttgcgaaatttaactcggaggtcgcttgataagcgttgcttatgaaaatgtgataattgtcaccctctcgcgccgataaaatcgcacgagagaatgggtatttaatgccagcaaaaatggtgaaccacctgagtgatgagctcgcgggtcggcttaataaagcgcgtttccaggtactcatccggctggtgggcctggttgatagagcccgggcctaacaccagcgttgggcagagggtctgaataaacggcgcttcggtacagtagttgaccacgtcggtttgcgcgccgaggagtttttcgacgacctcaaccagcttatggtccggcggacattcgtaaccggggatcggcggatgcagttcagcaacggtcaggcgaccaggccaacgctcgctcaccggcgccagcgcttcgttaaggagcccgttgagatcgttgagcgtcattccgggcagcggacgaatatccatatgcagttcgcagcaggcgcaaatgcggttggaggcatcgccgccgtgaattgccccgaggttaagtgtgggatacgggacggtaaacgcggcgtagtgataacgctcttttaaatcgtcgcgcagctgcatgatgcggccaatggcgtcgtgcatcagttcaatcgcgttgacgccgcgtgccgggtcgctggagtggcccgactgcccctgaatgcgaaccgcgttggacatgtggcctttgtgcgcgcgtatcggctgcagcgacgtgggctcgccgataatggcgcagtccggtcgcagctgggtcgtctcggcgaagtagcgggcaccggccatgctggtctcttcatcggccgtcgccagaatatagagcggctttttcagctgagtgacgtcaacgtcgcgcagggcgtcgagaataaaagcgaagaagcctttcatatccgcggtgccgagaccgtacagcttattgtcgtgctcggtcagggtaaaagggtcgcgggtccagcggccatcatcaaacgggacggtatcggtgtgcccggcaagcagcaggccgccagcgccgtggccgctgctggccagcaggttgaatttattacgcgtgtccgggactggctgaacttcaacattaaagccgatatcgcggaaccagcctgccagtaaattgattaaagactcattgctttgatccagcgcctcttcggttgcgctgatggaaggtgtggcgatcagcgcgcggtaaatctcgataaagggcggtaatttgtttttcattgttgacacacctcgggtcgtgatagtatcaatattcatgcattatttgtgaataaaaatacattatcgttgagcgtaagaaaacccatcgaatgtaaggatgatgctcttacggctcaacagggtggggaaggcaacggtcttccagggcaaatatacgtaagcaagaaggtgaagagccccaatgttgaacacgctgattgtgggcgccagcggttatgccggcgcagagctagtggcctatgtaaatcgccatcctcatatgaccataaccgcattgacggtctccgcgcaaagcaatgatgcgggaaaattagtttccgatttgcatccgcagctgaaaggcattgtcgatctgccgctgcagccgatgtccgatatcagcgagtttagccccggagtcgatgtcgtttttctggctaccgcgcacgaggtaagccatgacctggcgccgcagtttctcgccgctggctgcgtcgtgttcgatctttccggggcgttccgcgttaatgacggcgccttctatgaaaaatattacggtttcactcatcagcaccctgaactgctggagcaggcggtttacggcctggccgagtggagcgtcgaaaagctaaaagaagctaatctgatcgccgtaccgggctgctacccgacggcggctcagctatcgttaaaaccgctgatcgacgcggggctgctggatcttaaccagtggccggtgatcaacgcgaccagcggggtcagcggcgccgggcgtaaagcctctatcggcaatagcttctgcgaagtcagcctgcaaccctacggcgttttcaaccaccgtcatcacccggaaatttcaacccacctgggcgcggacgttatttttactccgcatctgggcaattttaagcgtgggattctggaaaccattacctgccgtctgaagcctggcgtgagcaaagagcaggtggcggcggtattccagcaggcctatgcggataagccgctggtacgtttatacgataaaggtgtccctgcattgaaaaatgtcgtgggtctgccattctgtgatatcggttttgcggtccaggatgaacatatcatcgtggtggcggcggaagataacctgctgaaaggcgcggccgcgcaggccgtgcagtgcgcaaatattcgtttcggcttcgctgagacgcagtctcttatttaaggtgtgatgatgaatcctttaattatcaaacttggcggcgtcctgctggacagcgaagaagcgcttgagcgcctgtttacggcactggtgaactaccgcgaatcccatcatcgcccgctgattattgtgcacggcggcggctgtgtggtggatgaactcatgaagcagctcaacctgccggtgaacaagaaaaacggtctgcgggtcacgccggcggatcagatcgacattattaccggcgcgctggcgggaaccgccaacaaaacgctgctggcgtgggcgaagaagcacggcctggctgccgttgggctattcctcggcgatggcgatagcgtcaaagtgacgcagcttgatgaagagctgggtcatgtcggattcgctcagccgggttctccggcgctgattaacacgctgctggctggcggatatatgccggtcgttagctccatcggcgtcaccgatgaaggcgagttgatgaacgtcaacgccgaccaggcggcgaccgcgctggcggcaacgctcggcgcagacctgattctgctgtctgacgtaagcggcattctcgatggtaaagggcagcgcatcgcggaaatgaccgccgagaaggctgaacagctgatcgagcagggcattatcaccgacggcatgatcgtcaaagtgaatgcggccctggacgcggcgcggacattaggccgcccggtcgatatcgcctcctggcgccacgcggagcagctccctgcgctgtttaacggcacgccgatcggcacgcgtatactggcataatcaatttatcattttgtcggcccggtaagcgtagcgccgccgggcaataaaattcaaagatattaaggaagcatgttatggcactttggggtgggcgttttactcaggcagcggatcagcggttcaaacagttcaacgactctttgcgctttgactatcgcctggcggagcaggatatcgttggctctgttgcctggtccaaagcgctggtgacggtgggcgtactgtccgccgatgagcagctacagctggaagaggcgctgaacgttctgctggaagacgtgcgggctaaccctcagcagatccttgaaagcgatgcggaagatattcatagctgggtggaaggtaagctgatcgacaaggtcggccagctgggcaaaaagctgcacaccgggcgtagccgtaatgaccaggtggcgaccgacctgaagctgtggtgcaaagacaccgtgatggaactgctgtcggcgaatcgtcagctacaaagcgcgctggttgagacggcggagaataatcaggacgccgttatgccgggctatacccacctgcagcgcgcgcagccggtgacgtttgcccactggtgtctggcctatgtcgaaatgctggcgcgtgatgaaagccgcctgcaggatgcgcttaaacgtctggacgtcagcccgctgggctgcggagcgctggcgggtaccgcctatgaaatcgatcgtgaacagcttgccggctggctgggcttcgcatcggcgacccgcaatagcctggacagcgtgtccgatcgcgatcacgtactggaactgctgtccgatgcctcaatcggtatggtccacctgtcgcgttttgctgaagatctgatcttcttcaataccggcgaagcgggctttgttgagctttctgaccgcgtgacttctggctcatccctgatgccgcagaagaaaaatccggatgcgctggagctgatccgcggtaaatgcggccgcgtgcagggtgcgctgaccggcatgatgatgaccctcaaagggctaccgctggcctacaacaaagatatgcaggaagataaagaaggcctgtttgacgcgcttgatacctggctcgactgcctgcatatggcggcactggtgctcgacggtattcaggtaaaacgcccgcgttgtgaagaagccgcgcagcagggttacgccaatgccaccgaactggcggattacctggttgccaaaggcgtaccgttccgtgaagcgcaccatattgtcggtgaagcggtagtggaagccattgcccagggcaagccgctggaggatctgcctctggccgatttgcagaaatttagccccgtgattgcggatgacgtctatccgattctggcgctgcagtcgtgtctggataagcgtgcggctaaaggtggcgtttctcctcagcaggtggctcaggcgattgccgacgctaaacagcgtctggtgtgatccgcctgcggggctgcttttaaggcggcaaataaacgaagctcgggtaactccgggcttttttatgcaaaaaaaagcggacacaaggtccgcaaaagttcacgttggctttagttatccgggtagagaggtgatgaggaagctcaatgattttctgaagttttcctcatttatgggtttattattgaacagaaaccttgatagggataatcgttcgttgctattctatctatcgccatggactatcgtggcgatggaggatgaataatgaatattcgcgatcttgaatatctggtagcgctagccgaacaccgccacttccgccgtgcggcggattcttgccacgtcagccaaccgacgctcagcgggcaaatccgtaagctggaggatgaactcggcgtgatgttgctggagcgcaccagccgtaaggttctgttcacccaggcagggctgctgctggtggatcaggcgcgtaccgtgctacgagaagtcaaagtgcttaaggaaatggcgagccagcagggagagaccatgtccgggccgctgcatattggactgatcccgacgattggcccttatctgttgccgttgattatcccgatgctgcaccagacctttcccaagctggaaatgtatctgcatgaagcacaaacccatcagcttttagcgcagcttgatagcggtaagctcgactgcgcgattctggcgctggtcaaagagagcgaagcgtttattgaggtgccgctgtttgatgagcccatgatgctggctatctacgaagatcacccgtgggcgaaccgcgagtgcgtgccgatgtcggacctggccggtgaaaagctgctgatgctggaagatgggcactgcctgcgcgatcaggcgatgggcttttgctttgaagcgggcgccgatgaagatacccatttccgggcgacgagcctcgaaacgctgcgtaacatggtggctgccggtagcggcatcacgctgttgccagccctggccgtgccgcaggagagaaagcgcgatggcgtggtctatgtgccctgcatcaagccggagccgagacgtaccgtggggctggtttatcgtccgggttcgccgctgcgtagccgctatgaacatctggcggaggccatccgcggtaagatggatggccatttcgacgccgcgttaaaacaggcggtttaagccatttaacgccgcgacccgataggcttccgccatcgtcggatagttaaaggtggtgttaacgaagtactcaatggtgttaccaccgcctttctgctccattatcgcctggccgatgtgaataatttcggccgcgcgctcgccaaagcagtgaatcccgaggatctctttcgtttcgcgatgaaagaggatcttcagcgtaccgacgctcataccgacgatctgcgcccgggccagatgtttgaactgcgcgcgacccacctcgtaaggcaccttcattgccgtcagctgctgctcggttttaccgacggagctgatttccggaatggtgtaaatcccggtagggatatcctcaatcaggtgcgccgatgcctcgccttttaccagcgcctgggcagcgatgcggccctggtcgtaggcggcggaggccaggcttggatagccaatcacatcgccgacggcataaatatgcggcagggcggtttgatacatgctgttgaccttcagctggccgcggctgtcggtttgcagaccgatattttccagcgccagtgagtcggtgttcccggtgcggccgttagcgtacagcaggcagtccgctttgagctttttgccggatttcagatgcatgatgacgccgtcatcaacgccctcaatcttttcgtactcttcattgtggcgaatgaccacgccgctgttccagaagtgataggagagcgagtcggacatctcctgatcgagaaacgccagcagacgatcgcgggtgttgatcagatccactttgacctccattccccggaagatcgacgcatattcgcagccgatcaccccggcaccgtagatgatcacatggcgcggttcgtgatgcaggctgagaatcgagtcgctgtcataaatgcgcggatgatggaagtcgacgtctgccggatggtacgggcgtgaaccgcaggcaatcacgaacttttccgccgtcaccgtttccacggtaccgtcgtggcactccagcgcgatagtgtgttcatcaacaaaatgggcattgccctgcaggatttcgcagtggttacgctcatagaaaccctgacgcatatgggtttgctggttaatgacgctgtcggcatggttcaggatgtcggcgaaggaagaacgaagaagacgggaatggtcgctgtagaggggattttggttaaactcgataatacggctgacggcatggcggagggcttttgacgggatggtaccccagtgggtacaaccgccgccgacgttatggtagcgctcaatgacggcaacgcgtgctccctgtttcaccagccccatggcggcaccttctccgccaggaccggaaccaatcacaattgcatcataatcccaagagtgtgacatggcattactcacctgttttatacataaaataaacacgatgataacattcgccgcgctttaacccaattatcgttgtgcttttttgcggcataaaagcagaaacagctcgtaaacaatcattcacaatccagtgtaaaccgattagttctaatctctggtatagtgccggaagggcttatggaaggattcagacaacgtgatgggcgtaagagcgcaacaaaaagaaaaaacccggcgttcgctggtggaagcggcattcagtcagctgagtgctgagcgcagttttgccagcttgagcctgcgcgaagtggcgcgggaagcggggatcgccccgacgtccttctatcgtcattttcgcgatgtcgatgagctgggtctgaccatggtggatgaaagcgggctcatgctgcgccagctgatgcgccaggcgcgccagcgtatcgctaaaggcggcagcgtcattcgtacctctgtttccacctttatggaattcattggcaacaacccgaacgccttccgcctgctgctgcgggaacgctccggtacctccgcggcgtttcgtgccgccgtggcgcgtgaaattcagcattttatcgcggaacttgccgactatttagaaatcgaaaaccatatgccgcgcgcctttaccgaagcgcaggctgaagctatggtcaccatcgtatttagcgctggcgccgaggctctcgatgtgggcccggagcagcgtcgacagctggaagaacgcctggtgctgcagctcagaatgatctcgaaaggcgcgtattactggtatcgccgtgaacaagaaaaaatatcaaatcattccgaataacgtgaaggacgagcaatgaaacactcagtacaagatagaggtacgctgctgctggcgctgatcgcaggtttatccattaatggtaccttcgccgcgctgttcagctccattgtccctttttccatcttccccattttgtcgttggtgctgacggtttactgcctgcatcagcgctatcagaatcgtagtatgcccgtgggtttgccggggctcgccgccgcctgttttattctcggcgtgctggtttacagtaccgtcgtgcgcgcggaatacccggacatcggatctaacttcttcccggcggttctgtcggtgattatggtgttctggattggctacaggttacgcaaccgcaagaacgcggtcgctgaataatctctcacccggcagcagcgctgttgccgggttttctcgcgcagctttacttcttcgttagcagcacgccgcattccatatgatgggtataggggaactggtcgaatagcgccaggcgcgcgatctcgtgggtctcactgagcgtttccaggttctggcatagggtctccggattgcaggagatatagagaatacgcggatacgcctgcaccattttctccgtttcgctatccagcccgctgcgcggcggatcgacgaaaatcgtctcgcactgatagctcttcaggtcgattccctgcaggcggttaaactcccgcacgccgttcatcgcctgggtaaactcttccgccgacatgcggataatctgcacgttatcaatgtggttcgctgcaatattgtattgcgccgccgcgacggacggtttggcgatttccgttgccagcacgcgttcgaaattacgcgccagcgccagcgaaaagttgccgttgccgcagtacagctcaagcaggtcgccggttgcgcctttagtggcgtcgatagcccactccagcatctgaatgttcatcgccgcatttggctgggtgaagctattctcaacctgacgatagatcatttcacgcccgccaaccggcaagcgttcatcgatatagtcttgatccagctcgattttagttttcgtggcgcggccaatcaggtgcacattcagattttgcgcccgcagcgcatcgcgcaggcgcgccgcctgctgacgccattcatcgtcgagctttttatgatacagcagcgatatcacggcctggttgctcagggtggtgagataatccacctgaaacagtttgtggcgcagtaccgggttatcgcgtacgccctcaatcaccgcggccatcagctgattaatcagctcgctggcggccgggaaagtctcgacgcggatccgggatttggtctgctggtcgaacataatgtggtacagatcgtcgccatcgtgccacaggcgaaactctgcgcgcatgcggtagtggctgaccggcgaacgaaacacttccggaaccggggcgctaaaaggcgccatcattttctgcaaacggacgactttttctgccagctgcgcttcatattgttcggtaggaaggtgttcgggggtcatgatgcatcctgaataaaataagtacgcggggattgtagggaaagcgccggggatgtccagccctgatgatataaggaaatataacggtagaagtctggacatctatatgtttctgattatagcatcgtgctaccggtcctatgagttaatagggaatccagtgtaaatctggagctgacgcgcagcggtaaggaaaagtgggatgagcgcattatgcagacactgcggctatttagcgggaagtcctcgtccattaaacactccaagcccgaagacctgccggaatacgtcgcatttggtttctatcatcgcgtgctactgatagagccggcggcatcctttgtttattacggatgctttaaaaatgattaaaaaagcttcgctgatgacggcgctctccgtcacggcattttccggctgggcgcaggacagcaattcagatacgttagtggtcacagcaaaccgttttcaacagccggtcaatacggttcttgcgccgaccgatgtggttacccgggaagatatcgatcgctggcaggcgaaagatttaaacgatgtgatgcgccgattgcctggcgtggacgtcgcacaaaatggtggcatgggtcaatcctcctctctttttatccgtggtactgaagccaaacaagttctggtgctggttgacggcgttcccatggcccgaccgggtattacaaataaccccgatctgaaccagatccctttgtcgctggtgcagcgcgtcgaatatatccgcggcccgcgttcagcgatttatggttccggggcaatgggcggcgtgattaacgtcattacgcattccgataaagaacaatccaaaattaccgctggggtaggatcgaaaggctaccaacaatatgacggtaccctgcgccatcgctttggcgatatggtggcgacggttgcgggttcttatgagggtaataaaggctttaacgttcagcccgattcaacctgggatcacgacggcgatcgcgacggttttcgtaataaaacgttttggggcagcctcgagcataaatttaacgagaatgttgacggtttcttccgcggacacagctacaccaacaactctgattacgatctgggaagcccgccgtatagcccggcctacagcgccgatgaaagccagctctataaccagagctgggatgcggggctgaactttaattccggaatttattcctcccagctcatcgccagctatcagaagataaaggactacaactacagcagtatttatggccgttataatgatgggacgacgctcgacaggatgacgcagcgtaacctgcaatggggcaataacgttattgtcggtcatggctctgtcagcgcaggggtggactggcagcagcagcggttaacttcatcagatacggcgatgtcggatacctacaaacgtgacaatacgggactgtacctgacgggccagcagcaagttggcgacgtgaccctcgaagcgtccggacgtgaagaccacgatgagcagtttggctggcacggtacctggcagactaccgcaggctgggagtttgtcgaaaattatcgcctgactctcggctacggtaccggcttcctcgcgccttctttagggcaacagtttggctccacccgatttggtatcaacgcgaatcctaatctgaaacctgaagagtcgaaacagtgggaagctgggctggaagggctcaccggtgccgtggactggcgcttgtccgcgtaccattacaaaattactaacctgattacctattattccgatcctgttacctatgacggggaatacgacaatatcaatgccgcgacgattaaaggcgtggaatggacgggaagtatcgataccggtattttcagccatcgcgtaacgttgcagtatgtcgatccgcgtaacgatgataacggtgaagtgctggcccgacgttctaaacgacaggcaaagtatcagctggattggtccatgtttgatgtcgatatggatgtgtcctggcagtattatgggaagcgttacgataacaacacctcccagtacaacaatacgcaaagaattttgccgagctacagcacggtagacgtttctgcatcgtatccgatcaccgatcgcctgacagttcgtggtaaaatagctaacctgttcgataaagattacgagacagcttatggctaccaaactgcaggacgagaatactacttgtctggcagctacaccttctgatccacgtcccaccgtgctggtgtttgattccggcgtcggtgggctgtcggtttacaatgagattcggcagcttctgccgaatctgcattatatctacgctttcgacaacgttgctttcccctacggcgagaagagtgaagagtttattgttgaacgcgtcctggagattgtgactgcggttcagcagcgttaccctctggcgctggccgttattgcctgtaacaccgcaagtaccgtttccctccccgccttacgcgataaattcgcctttccggttgtcggcgtcgttccggcgataaaaccggcggcccgcttaacggcgaatggcgttgttggcctgctggcgacgcgcggaacggtaaaacgcccttatacgcgcgaactgatctcccgttttgcgaatgaatgcaaaatcgaaatgctggggtcggcagagctggtagaactggcagaggccaaactgcacggtgagccggtcccgctggatgaactgcggcgtatcctgcgtccctggctacgaatgcaggaaccgcctgatacggttgtgctgggatgtacgcatttccctctaatacaagaagagctgcagcaggttctgccggaagggacgagaatgatcgactccggagctgcgattgcgcgtcgcaccgcctggctattagagcacgaagcgcctgacgcaaaatcgagtgatgccaatattgcgtactgtatggcgctgacgcctgaaactgagcagcttttgagcgttttgcggcgctatggcttcgagtcgctggaaaaactggcgctttcatagcattttgcacaaaaaagagacggttgaaagattttttgaagacagggcttgtcaacgtctcagaactccctataatgcgcctccactgacacggaacaacggcttacagcccgccgggtcagcgggattcagcgatgaataccggcagagaaaagcgaaaataatcgcttgactctgaatgaggaaaacgtattatacgggacctcgcgacagagcgctgaagcgcgtcgcaactgctctttaacaatttatcagacaatctgtgtgggcactcaaagtgacatggattcttaatgtcttcggacaataaatgaataccaagtctctgagtgaacacgtaattcattacgaagtttaattcacgagcatcaaacttaaattgaagagtttgatcatggctcagattgaacgctggcggcaggcctaacacatgcaagtcgaacggtagcacagagagcttgctctcgggtgacgagtggcggacgggtgagtaatgtctgggaaactgcctgatggagggggataactactggaaacggtagctaataccgcataacgtcgcaagaccaaagagggggaccttcgggcctcttgccatcagatgtgcccagatgggattagctagtaggtggggtaacggctcacctaggcgacgatccctagctggtctgagaggatgaccagccacactggaactgagacacggtccagactcctacgggaggcagcagtggggaatattgcacaatgggcgcaagcctgatgcagccatgccgcgtgtatgaagaaggccttcgggttgtaaagtactttcagcggggaggaaggcgataaggttaataaccttgtcgattgacgttacccgcagaagaagcaccggctaactccgtgccagcagccgcggtaatacggagggtgcaagcgttaatcggaattactgggcgtaaagcgcacgcaggcggtctgtcaagtcggatgtgaaatccccgggctcaacctgggaactgcattcgaaactggcaggctggagtcttgtagaggggggtagaattccaggtgtagcggtgaaatgcgtagagatctggaggaataccggtggcgaaggcggccccctggacaaagactgacgctcaggtgcgaaagcgtggggagcaaacaggattagataccctggtagtccacgctgtaaacgatgtcgacttggaggttgttcccttgaggagtggcttccggagctaacgcgttaagtcgaccgcctggggagtacggccgcaaggttaaaactcaaatgaattgacgggggcccgcacaagcggtggagcatgtggtttaattcgatgcaacgcgaagaaccttacctactcttgacatccagagaacttagcagagatgctttggtgccttcgggaactctgagacaggtgctgcatggctgtcgtcagctcgtgttgtgaaatgttgggttaagtcccgcaacgagcgcaacccttatcctttgttgccagcggtccggccgggaactcaaaggagactgccagtgataaactggaggaaggtggggatgacgtcaagtcatcatggcccttacgagtagggctacacacgtgctacaatggcatatacaaagagaagcgacctcgcgagagcaagcggacctcataaagtatgtcgtagtccggattggagtctgcaactcgactccatgaagtcggaatcgctagtaatcgtggatcagaatgccacggtgaatacgttcccgggccttgtacacaccgcccgtcacaccatgggagtgggttgcaaaagaagtaggtagcttaaccttcgggagggcgcttaccactttgtgattcatgactggggtgaagtcgtaacaaggtaaccgtaggggaacctgcggttggatcacctccttaccttaaagaacctgcctttgtagtgctcacacagattgtctgatgaaaatgtagcagtaaaaaaatctctgcaggcttgtagctcaggtggttagagcgcacccctgataagggtgaggtcggtggttcaagtccactcaggcctaccaaatttctgctgatgctgcgttgcggcgacactcacatactttaagtatgcttcgtgtcaccacgccttgcctcaacagaaattaaggttgatgagattaactacgatggggctatagctcagctgggagagcgcctgctttgcacgcaggaggtctgcggttcgatcccgcatagctccaccatctttactgcacaacacaagaaaacttcagagtgtacctgaaaaggttcactgcgaagttttgctctttaaaaatctggatcaagctgaaaattgaaacgacacacagttaatgtgtgttcgagtctctcaaattttcgcgacacgacgatgttttacgaaacatcttcgggttgtgaggttaagcgactaagcgtacacggtggatgccctggcagtcagaggcgatgaaggacgtgctaatctgcgaaaagcgtcggtaaggtgatatgaaccgttacagccggcgatgtccgaatggggaaacccagtgcaattcgttgcactatcgtttgatgaatacatagtcaaacgaggcgaaccgggggaactgaaacatctaagtaccccgaggaaaagaaatcaaccgagattcccccagtagcggcgagcgaacggggagcagcccggagtctgaatcagcttgtgtgttagtggaagcgtctggaaagtcgcagggtacagggtgatactcccgtacactaaagcacacaggttgtgaactcgaagagtagggcgggacacgtggtatcctgtctgaatatggggggaccatcctccaaggctaaatactcctgactgaccgatagtgaaccagtaccgtgagggaaaggcgaaaagaaccccggcgaggggagtgaaaaagaacctgaaaccgtgtacgtacaagcagtaggagcccactggttgggtgactgcgtaccttttgtataatgggtcagcgacttatattctgtagcaaggttaaccgtataggggagccgcagggaaaccgagtcttaactgggcgttaagttgcagggtatagacccgaaacccggtgatctagccatgggcaggttgaaggttgggtaacactaactggaggaccgaaccgactaatgttgaaaaattagcggatgacttgtggctgggggtgaaaggccaatcaaaccgggagatagctggttctccccgaaagctatttaggtagcgcctcgtgaattcatcttcgggggtagagcactgtttcggctagggggtcatcccgacttaccaacccgatgcaaactacgaataccgaagaatgttatcacgggagacacacggcgggtgctaacgtccgtcgtgaagagggaaacaacccagaccgccagctaaggtcccaaagtcatggttaagtgggaaacgatgtgggaaggcccagacagccaggatgttggcttagaagcagccatcatttaaagaaagcgtaatagctcactggtcgagtcggcctgcgcggaagatgtaacggggctaaaccatgcaccgaagctgcggcagcgacactatgtgttgttgggtaggggagcgttctgtaagccgttgaaggtggcctgtgagggttgctggaggtatcagaagtgcgaatgctgacataagtaacgataatgcgggtgaaaaacccgcacgccggaagaccaagggttcctgtccaacgttaatcggggcagggtgagtcgacccctaaggcgaggccgaaaggcgtagtcgatgggaaacaggttaatattcctgtactcggtgttactgcgaaggggggacggagaaggctatgttggccgggcgacggttgtcccggtttaagcatgtaggcggatgttccaggtaaatccggagcgtcactaacgctgaggtgtgatgacgaggcactacggtgctgaagtgacaaatgccctgcttccaggaaaagcctctaagcatcaggtaacatcaaatcgtaccccaaaccgacacaggtggtcaggtagagaataccaaggcgcttgagagaactcgggtgaaggaactaggcaaaatggtgccgtaacttcgggagaaggcacgctgatggtaagtgaagtgacttgctcatgaagctgaaatcagtcgaagataccagctggctgcaactgtttattaaaaacacagcactgtgcaaacacgaaagtggacgtatacggtgtgacgcctgcccggtgccggaaggttaattgatggggttatcctcgcggagaagctcttgatcgaagccccggtaaacggcggccgtaactataacggtcctaaggtagcgaaattccttgtcgggtaagttccgacctgcacgaatggcgtaatgatggccaggctgtctccacccgagactcagtgaaattgaactcgctgtgaagatgcagtgtacccgcggcaagacggaaagaccccgtgaacctttactatagcttgacactgaacactggtccttgatgtgtaggataggtgggaggctttgaagtgtggacgccagtctgcatggagccatccttgaaataccaccctttaatggctggtgttctaacgtgggcccctgatcggggttgcggacagtgtctggtgggtagtttgactggggcggtctcctcctaaagagtaacggaggagcacgaaggtcagctaatcctggtcggacatcaggaggttagtgcaatggcataagctggcttgactgcgagcgtgacggcgcgagcaggtgcgaaagcaggtcatagtgatccggtggttctgaatggaagggccatcgctcaacggataaaaggtactccggggataacaggctgataccgcccaagagttcatatcgacggcggtgtttggcacctcgatgtcggctcatcacatcctggggctgaagtaggtcccaagggtatggctgttcgccatttaaagtggtacgcgagctgggtttagaacgtcgtgagacagttcggtccctatctgccgtgggcgctggagaattgaggggggctgctcctagtacgagaggaccggagtggacgcatcactggtgttcgggttgtcatgccaatggcattgcccggtagctaaatgcggaagagataagtgctgaaagcatctaagcacgaaacttgccccgagatgagttctccctgaccctttaagggtcctgaaggaacgttgaagacgacgacgttgataggccgggtgtgtaagcgcagcgatgcgttgagctaaccggtactaatgaaccgtgaggcttaaccttacaacgccgaagatgttttggcgatttgagaagacaacaatttcagcttagattcagagttgagtacgcaataaaagatggcgtactgagcacaaagaatttgcctggcggcactagcgcggtggtcccacctgaccccatgccgaactcagaagtgaaacgccgtagcgccgatggtagtgtggggtctccccatgtgagagtagggaactgccaggcatcaaattaagtagtaagccggtgcataaatccggtggttacagaagtattcggtggagcggtagttcagtcggttagaatacctgcctgtcacgcagggggtcgcgggttcgagtcccgtccgttccgccacttattaaaaaattaagcctgctgattaagcaggcttaatgataagaaactttaggggcgtagctcagttggtagagcaccggtctccaaaaccgggtgtcgcgagttcgagtctctccgcccctgccatatataatcctttgctcaggcaaaggattttttttgctttcaatttccccccaatcgtcctccatccctggaggagtgcgtttatcccaatatattgtgcttcaggatctcccgaatctgcgcttgtttatcgctgttctgtagccaaatcgcatagagaggccttgaaagagtcgcactgtcggtaaccgtatgcagattatttttcccctgtgcccagagcacgggcagccatgtacagcccttaagcgcgctgagctgttggtaagctaactcggcagaactggtggtcagcagaggaatatcatcatttccgatcaatcccgcttcgttttgttggaaatcgggcccccattccaggcgtaaataattcaattcatttgtgtatttagccggagaggcacaataaagcgccagggtaaaattacccagcaactggctgcttagttcatccatcttcggcgattctgtcgtgatcaagagatcaagctgacgttcgtgcagctgtttgaccagcgattgccgctgcgcaatccgcgcctcaaactgtaggttatagggctctgtatagagctttcccagccatccattaagcaggcattcccacagagaagcgctggcaccgatcgaaaattcattatggcgggaagcattcgcgacctccttgcgcgcagcttgccaggtattcatcagggtttcggcgtagggtagcagtttctctccggctgaggtcagacggatattattacgatgacgggtaaaaagatttacccccagctggttctccagctgacgaatacgaaagctaactgctgactgcgtcagataaagcgcctctgcggctcggccaaagtggcgagttctgctcacctcaaggaaagtcttgagcaattccgtatccacactcttctccgcaaaattatttgtcgtgatgatttaaatgttttgtttgacgctctgtcaagcgtaactaatactccgcgccataattagctcggccaaagaatcaggagcgtgtaggatggcggaaagctttacgacaactaatcgttttttcgacaataaaaattatccgcgcgggttttcccgtcatggagatttcaccatcaaagaggcgcaactgctggaacgtcatggttatgcctttaatgaactcgaactaggtaaacgcgagcctgtcaccgacgatgaaaaacagtttgtttcggtatgccgtggtgaacgtgagcccgcaacggaagcagaacgcgtctggattaagtacatggcgcgcattaagcgtccgaagcgtttccataccctgtccggcggcaagccgcaggtggaaggtacggaagattacacagaaagcgatgattaagaaaaagggcgtaagccctttttttacgccatcattttttgtagatggctcaacattctgtctattgcccgatagccgagagcctcctgcaaatgatggcgttcgatgcgttcgacagcctcaatatcggcaatagttcgggacactttaatcaggcgctgccaggcgcggattgaaagcccgagctgtattagcgtctgctccagccagacagcatcatctttatgaagccggcagcagattttcatctcatcatttcccagatgcgcgttaagttttttctgccgcgatagctgcctttcgcgtgcggccagaacacgttggcgtacgcaggcgctactttcctcttcgtttgttccctggctgagcacccccggcggcggaagtgggatctccagggagagatcgaatcggtcaagaaacgggccggataaacgacccaggtagcgtagcgtctgttccggtgaagcgcgattatgctggccctgatagtgtcctgtcgggctgggattcatcgctgcaataagctggaaacgggctggataatcgattttggcgcgcgtgcgtgagatatggataacccctgactcaatgggttcgcgtaacgcatccagcaccctgcgttcgaattcaggcagctcatccaggaacaggactccgttatgggcaagggagatctctcccggtgccggaattgagcctccgcccaccatagccgccagggaggcgctatgatgcggggcacgaaagggcctgcggcgccaatttttcatgacatgcctggaatcgaccaggctaagtattgccgcgctttccagcgcttcctgattactcagcggcggcagtagtcccggtaatcgactggcgagcatcgtttttcctgtgccgggcgggcctatcatcagcaggttgtgaccacctgcagcgatgatttccagcgctcgtttcccctgccgttggccaataacatcacgcagatcaaccgatgtttcatccgaatattccccttctggaagggggttagccagggcatgtcgaccttcgagaaaagcgcagacttcctggagatcggtggcgataaggcagtcactgccgccgattaaccccacctctggagaattctcattagagataacaatcttccgccccgcttttatggcctccatggcgctggatatggccccaggaacgccacgcagagcgcctgtaagcgccagctcgccgacaaactcatattgatttagcctaggggcctttagctgctctgaggccaccagaagcgcgagagcgataggtaaatcatatcttcccccttcttttggcagatcggccggggccagattgatggtgatttttttcgccggataagcgtagccgctgttgataatcgcactacgtacccggtcacgcgcttctctaaccgttgtttcaggcagtcctaccattgtcaggcctgggagcccgttgctgatatgaacttcaaccgtgataagcggggcaccgatcccgagagcggcgcgggtgtaaacaatggcgagtgacataacacctcctgagaaccaggattatgtcggcgatttgctgttgagtaattcggcaatattaaattctgcatgcttgctcccagccaatttcccggcaatttccgctttgcactgatgttggatgccggctcgtaaaatgctgtcatcaggcaacaagatgaaaaagtgctgtggagcacgccacaaattgaaatattttcatttcatatttttcccattaaaaacaattgttttttcttaaatggttagcaaggtaagtaatgaggtcataaaaaatcttgtgtttaacacgaagtctgtggtacctctttaggtattccttcgaacatgaagccagaaagaacataaaatgacagcccttctacgagtgattagcctggtcgtgattagcgtggtggtgattattatcccaccgtgcggggctgcacttggacgaggaaaggcttaaaaaacaagccttaacgaactaagacccccgcaccgaaaggtccgggggtttttttataacttaaaaacagaaaagaggagcagacgatggctggtagcataaaattctgtttctctcgatctacgacggggaagtaactatgaatggggcgcggtgggtagtacatgctttgcgagcacagggagtcgataccgtttttggctatccgggtggagcaattatgccggtttacgatgcattgtatgacggcggcgtggaacacctactgtgccggcatgaacagggcgcggctatggcggctatcggctatgccagggctaccggcaaaaccggggtgtgtatcgccacttcggggcctggcgcaaccaacctgatcaccggcctcgccgacgcgctgcttgattccgttcccgttgttgctatcaccggccaggttgctgccccgttcattggtactgatgcattccaggaagtggatgttctcggattatcgctggcatgcactaagcatagttttctggtgcagtcgctggaagagctgccgcgtgtcattgctgaagctttccacgtggcaaactccgggcgtcccggtcccgtgctggtcgatatcccaaaagacatccagctggctcagggcgatctcgatccgcatttttccatggtagccgacgacgttgattttccatatgcggatatcgaatacgctttgcagatgctggctcagtcgcagaagccgatgttatacgttggtggcggcgtggggatggcgcaggcggtaccggcgctgcgcgaatttcttgccgttacgcaaatgcccgtgacgtccaccctgaaagggctgggagcggtagcggcggattatccctactatctgggcatgctggggatgcacggtactaaagcggccaaccttgcagtacaggaatgtgacctgctgatcgcggtaggcgcccgttttgacgatcgcgtcaccggcaagctgaatacgtttgccccgcacgccaaagtcatccatatggatatcgatccggctgaactgaacaagctccgtcaggcacatatcggcctgaccggtgatttgaatgtgatgctgcccgcgctgcagcagccgctgtctatcgacgcctggcgccaacgtaatgcgcagctgcgcgccgagcatgcctggcgctacgaccatccgggagacgctatctatgccccgctgctgctgaagcagctttccgatcgcaaacccgcagactgcgtcgtgacaaccgatgtgggccagcatcagatgtggtcagcgcagcatatgacctatacgcgcccggagaatttcatcacttccagcggattaggcactatgggtttcggcttgcccgcagcggtaggcgcgcaggtggcccgtccagacgatacggttatctgtatctccggtgacggctccttcatgatgaacgtgcaggagctgggcaccgtaaaacgcaagcagctgccgctgaagatagtcttactggacaaccagcgtttaggaatggttcgacaatggcaacagctgttttttcaggaacgttatagcgaaaccacccttaccgataaccccgatttccttactctggccagcgccttcggcatccctggtcaacacatcacccgtaaagaccaggttgaagcggcactcgacaccatgctttcgagccaggggccttacctgcttcatgtctcaatcgacgaacttgagaacgtctggccgttggtgccgcccggtgccagtaatgcagaaatgctggagaaattatcatgatgcaacatcaggtcgccttgcaggctcgctctaatccagaaacgttagaacgcgtgctgcgcgtcgtgcgccatcgcgggttccagatttgcgcgatgaatatggcaaccgccgccgatgcccggaatattaatattgaactgaccgttgccagccagcggcccgtcgaattactgtttagtcaattaagcaaactggtggacgtcgcctgcgtcgagatccagcaacctacatcacaacaaattcgcgcctgagcgcaaaggaagaataatgacgacgaaaaaagctgattacatttggttcaatggcgagatggttccgtggggagaggcgaaggttcacgtgatgtcccatgcgctgcactacgggacttccgtatttgaaggcatccgttgctacgactctcacaaggggccggtggtgttccgtcaccgtgaacatatgcagcgtctgcatgactcagccaaaatttatcgtttcccggtttctcaaagcgttgatgagctgatggaagcctgccgtgaagtcattcgtaaaaacaatctgaccagcgcctatattcgcccgttagtttttgtcggcgacgtgggcatgggcgtcaacccgcctccgggctatagcactgacgtgatcatcgcggcgttcccgtggggcgcctacctgggtgccgaagcgctggatcaggggatcgatgcgatggtttcttcctggaatcgcgcggcgccgaacaccattccgaccgcggccaaagccggcggtaactatctctcttcgctgctggtcggcagcgaagcgcgtcgtcatggctatcaggaaggtatcgcgctggatgtgaacggctacatctctgaaggcgccggtgaaaacctgtttgaagtgaaggatggcgtgctgtttactccgccgttcacctcttccgcgctgcctggcatcacccgcgacgctatcatcaagctggcgaaagatctcggcctggaagtccgcgagcaggtattgtcccgcgagtccctgtacctggccgacgaagtgtttatgtccggtactgccgcagagatcacgccggtacgcagcgttgatggtattcaggtgggcgaaggccgctgcggcccgatcaccaagcgcattcagcaagcattctttggcctcttcaccggtgaaaccgaggataaatggggctggttggatcaggttaataactaagtataaaaagatggggcggcacgcaacgccccatttcaccgaaactgggagtaactaaagcatgcctaagtaccgttccgccacaaccactcacggccgtaatatggcgggtgcccgcgcgctgtggcgcgccactggaatgaccgacgatgatttcggtaagccgattatcgccgtggtgaactctttcacccagttcgtgccgggccacgttcacctgcgcgatctcggcaaactggttgctgagcaaatcgaagccgctggcggcgtcgccaaagaattcaacaccattgcggtggatgatgggatcgcgatgggccacgggggtatgctttattcactgccatcccgcgaactgatcgccgactcggttgagtatatggttaacgcccactgtgctgatgcaatggtctgtatctccaactgcgacaaaatcaccccggggatgttaatggcgtctctgcgcctgaatattccggtcatttttgtttccggcggtccgatggaagccgggaaaactaaactgtccgatcaaatcattaaactcgacctcgttgacgcgatgattcagggcgctgacccgaaagtctccgacgatcagagtcatcaggttgagcgttccgcctgcccgacgtgcggctcttgttcgggaatgttcaccgcgaactccatgaactgcctgaccgaagcgctgggcctgtcgcagccgggcaacggctcgctgctagcgactcacgccgatcgtaaacagctgttcctcaatgcgggctcacgtatcgttgagctgactaaacgctattacgagcaggacgatgcctctgcgctgccgcgtaatatcgccaataaggcggcgtttgaaaacgccatgacgctggatatcgccatgggcggttccaccaataccgtactgcatctgctggcggcggcgcaggaagcggaaatcgacttcaccatgagcgatatcgataaactttcccgcaaagtgccgcagctgtgtaaggtcgcgccaagtacgcagaaatatcatatggaagacgtgcatcgcgcgggcggcgtattgggtattttaggtgaactggatcgtgccgggctgctgaaccgcgatgtgaaaaacgtgcttggtttgtccctgccgcagacgctggagcagtacgatatcaccgtcacgcaggatgaagcggttaagaagatgttccgcgctggccctgcgggtatccgcacaacgcaggctttctctcagaactgccgttgggacaccctggatgacgatcgcgcagaaggctgtatccgctcgctggaacatgcttacagcaaggacggcggtctggcggttctgtacggcaactttgccgagaacggctgtatcgtgaaaaccgccggcgttgacgacagcatcctcaaatttaccggcccggcgaaggtatacgaaagccaggacgcggctgtggatgcgatcctcggcggcaaggtggtcgccggtgacgtagtcgtcatccgctatgaagggccgaaaggcgggccggggatgcaggagatgctctacccgacgaccttcctgaaatcaatgggcctgggtaaagcctgtgcgctgattaccgacggacgcttctccggcggtacttcaggtctctctattggtcatgtttctccggaagcggccagcggtggcaatatcgcgatcattgaagatggcgacatgattgctatcgatatcccgaaccgcggtattcagctgcagctaagcgatgccgagattgcggcacgccgcgaagctcaggaagcgcgcggtgataaagcatggacgccgaaagatcgcgagcgtcaggtttcctttgcccttcgcgcctatgccagcctggcaaccagcgccgacaaaggcgcggtgcgcgataaatcgaaacttgggggttaatgatggccgagtctcaacccctgtccgccgcccccgagggggcggaatacctcagagcggtactgcgcgcgccggtatacgaagccgcgcagatcacgccgctgcaaaaaatggaaaagctctcgtcgcgcctcgataacgttgtgctggtgaagcgtgaagaccgtcagccggtgcacagctttaagctgcgcggagcctacgcgatgatggcgggcctgacggaagagcaaaaatcgcatggcgtgattaccgcttcggcgggtaatcatgcgcagggcgtggctttctcggcatctcgcctgggcgtgaaggcgctcatcgtcatgccaaccgccaccgcggatatcaaagttgatgcggtgcgcggcttcggcggtgaagtgctgctgcacggcgcgaatttcgatgaagccaaagccaaagccatcgagctggcgcagcagcaggggttcacctgggttccgcccttcgaccatccgatggtgattgccgggcaggggacgctggcgctggagctgctgcagcaggatgcccatatcgatcgcgtatttgtcccggtcggcggcggcggtctcgcggccggcgtggcggtgctgatcaaacagctgatgccgcagattaaagtcattgcggttgaggccgaggattctgcctgtctgaaagccgcgctggatgcgggtcatccggtcgatttaccccgcgttgggctttttgccgaaggcgtggcggtgaaacgcatcggcgatgagactttccgtctctgccaggagtatctcgacgacatcgttaccgtcgatagcgatgccatctgcgcggcgatgaaagacctgtttgaagatgtgcgtgcggtagcagaaccttccggggcgctggcgctggcggggatgaaaaaatatatcgctcagcataatattcgcggcgaacgcctggcgcacgtactttcgggcgcgaacgtcaacttccacggcctgcgctacgtttccgaacgctgcgagctgggggaacagcgcgaagcgctgctggcggtcaccattccggaagagaagggcagcttcctcaagttctgccagctgctgggcggccgttcggtgaccgagttcaactaccgcttcgcggatgcgaaaaatgcctgcatttttgtcggcgtgcgcctgagccgggggctggaagagcggaaagagatcctcaacctgctgcacgacggtggctacagcgtagtggatctctccgacgatgaaatggccaagctacacgtgcgctacatggtcggcgggcgtccgtctcagccgctgcaggagcgtttgttcagcttcgagtttccggaatcgcccggcgcgctgctgaagttcctgcatacgctgggcacccactggaacatctctctgttccactatcgcagtcacggtaccgattacggccgcgtgctggcggcattcgaactgggcgatcacgagcctgacttcgaaacccgcttgcatgagctgggctacgattgccatgatgagagcaataatccagcgttcaggttcttcctcgccggttaagaagcgctgtgcttgtcaggcctgtggtcgggctgcaggcctgagcaggcccggcattagtggccaggcagcaaattccagaacgcattaatcagcggctcatgcagccgcttttttggcgcgcagacgcccagctcaaacggggttttctcgtcgctacgctccagaatcatcacgcgattgcgcactggctcagggctgttttccagcaccacctccggcagcagcgcgacgccgcagccgagcgccaccatggagaccatggcttcatgcccgcccaccgtggcgtaaattgacggattactgattttatggcggcgaaaccatagctcaatgcggcgacgcacgggcccctggtcggccataataaagggtaccgttgcccagtcaggcttctccactgagacctggttacgaaccggacaaggcagcgccggggcgatcagcaccaccgccagattctccagcatggaaaaagccaccgcgccgggcagcgtttccggtttcccggcaatcgccagatcggcctcacccgtcaccactttttccatcgcatcagcggcatcgccggtggtgagctttatttccaccgagggatgctcggcgcggaaacgatcgagaatcggcggcagatgactgtaggcggcggtcaccgaacagaagatatgcagttcgcccgacagcgacggaccttgctgatcgatagtgtggcgcagctgctgatactgcaacagcgtctgctgggcaaaggtgcggagctcttctcccgcttcggtaagcgttaccgtgcggttatcgcggacaaacagcggctgcccgaggtcttcttccaggcgctgaatttgtcgggaaagcgtggaggggctgacgtgcatcgcccgcgcgctgcggccaaaatggcggctttcagccagatgcaggaaggttttcagatcgcgtaaatccaccggcggcactccacgattttacattgcagaaattgcaacgtgacgttgtgaatatatcaatttccgcaataaatttcctgttgtaatgtgggtacattctcgctgaaacgcgaaccgaacaaaataagacacacaacatcacgaggtatcaccatggctaactactttaatacactgaacctgcgccagcagctggcgcagctgggcaaatgtcgctttatgggtcgcgacgaattcgccgatggcgcaagctaccttcagggtaaaaaagtggtcatcgtcggctgtggcgctcagggcctgaaccagggtctgaacatgcgcgactccggtctggatatctcctacgcgctgcgtaaagaagcgattgccgaaaagcgcgcatcatggcgcaaagcaaccgaaaacggcttcaaggtgggtacctacgaagagctgatcccgcaggccgatctggtggttaacctgacgccggacaaacagcactctgacgttgtacgttccgttcagccgctgatgaaagacggcgcggcgctgggctactctcacggcttcaatatcgtggaagttggcgagcagatccgtaaagatatcaccgtcgtgatggtggcgccgaagtgcccgggtaccgaagtacgtgaagagtacaaacgcggtttcggcgttccgaccctgatcgcggttcacccggaaaacgatccgaaaggcgaaggtatggccattgctaaagcctgggctgcggcgaccggcggccaccgtgcgggcgtgctggaatcgtccttcgttgccgaagtgaaatccgacctgatgggcgagcagaccatcctctgcggtatgctgcaggccggttctctgctgtgcttcgataagctggtggaagagggtaccgacccggcatacgccgaaaaactgattcagttcggctgggaaaccatcaccgaagcgctgaagcagggcggtatcactctgatgatggatcgcctgtctaacccggctaagctgcgtgcttacgcgctgtccgaacagctgaaagagattatggcgccgctgttccagaagcatatggatgacatcatctccggtgaattctcctccggcatgatggctgactgggccaacgacgataaaaaactgctgacctggcgtgaagagaccggcaaaaccgcgttcgaaactgcaccgcagtttgaaggtaaaattggcgagcaggagtacttcgataaaggcgttctgatgatcgcaatggtgaaagcgggcgttgagctggcgtttgaaaccatggtggattccggcatcatcgaagagtccgcttactacgaatcactgcacgagctgccgctgatcgccaacaccatcgctcgtaagcgtctgtacgaaatgaacgtggttatctccgataccgctgaatacggtaactacctgttctcttacgcttgcgtaccgctgctgaaagagttcatgaccaccctgcagaccggcgacctgggcaaagcgattgccgaaggcgcggtagacaacgctcagctgcgcgacgtgaacgaagctattcgcagccacgctatcgagcaggttggtaagaaactgcgcggctatatgaccgacatgaaacgcattgcggtagcgggctaattccccgtcgtctttcaacttgcagatgcgttggctgcgttcgtacaccccagtcacatagttatctatactcctggggctgtactcacttgccgccttcctgcaagctgaaatccttaggggaaagctgtgagataaaaaaccggtgcaaataagacaccggtttttttatttgcggtacagcaccttgatgatgtgataaccaaactgggtgtgcagcgggccggtcggctccagctccgggcaggagaagacgactttatcaaacgccggcaccatctggccctggcggaattcacctaaatcgccgccgcgtttgcctgacgggcagatcgagtgcttcttcgccagtttgccgaaatcggcgccgtttttaatttgctccagaagatccagtgccagctgctcttctttaaccagaatatgcagtgctgctgccgtttttgccatgatcgtaccttgagtgagtgggggataaaccagggcgcaatagtagcatgggctagcggcgatacagcaccttaatgatgtggtagccgaacttggttttgaccggtccatatggctttagcagcgggcagctgaagaccgctttatcgaacggcccgaccataacgccttgattaaactccccgagatcgccgccgttgcgtccggatgggcactttgaatagcgctttgccagatgatcgaagctcacgccacgttccagtttggcgaggatctcttgcgccagcttctcttcttttaccaggatatgcagggctgctgcgctctttgccattattttgctctcatgtctcaaagatatcccgttactttaccatccgctttggtcgcggacctatactcttcgccatcgcgggacaggtgtctcgcctgatagacggaagcgggagatgggcaacacttttcttcggcgttttccttctggccggggacagccgtcctgtccttatcgtcgtggagcgagataacatggatacaatgaaaaagcctgaattttcagtcggctggctttccgggctgagcgagattgtgcgcgatccgctgctctatgaattactgaaatattgtcctctggagatcatgcggcgctggcgcttcgaagacattccgcgcggtgattttatctgccgacagggggaagtgtgccagcgtttttcgctgattatcgccggtgaggtagacgttttctatgaggctgaagacgggcgccgctaccgccaggcccgctaccgtaaaggtgacatggtgggcgaactcgagatctttgagtcgcgtcattacatctgctcggtggtggcggtggaccatgtgcagctcctgagcctgtcgcaggaacatttctgccgctggctggcgctggataaccactttaaccagcggatgctgcgcttctttagccagcaatattatcagctatcgaaaaaggccagcagcgacaatctctactcgctgcatcagcgggtgtgtcaggcgctatggctgcgttatcaacaggatggcgcgaatgaaatcttgctggataagcagaatctcagtcaggagttcgcggcgacgacccgcagcattaaccgtattttgcatgacctgaaagcgctacagattattgataccgatggtgaacgaattgtgttgttagctcctgaaaaactgaagcaggaggctgatatcggataaccgcaagagtaaggaggcgggagaatgtcgctgcaaccccatatccagttaagcaaagagatgaccggcgcgcggtacgcgctgctgccgggcgacccgcagcgggtcgaccgcatcgtcaattttcttgataatccacagcggctcggtcagaaccgggagtttcgcgccgcgcgcggctggtatcagggcatcgagattttggtgctctccaccggcatcggcggaccctccacggcgatcgccattgaagaactgcgccagattggcgtaacaaccctgattcgtatcggcagctgcggcgcattgcaggataatcttgcgctcggcgatgtgattatcgctcacgctgcggtgatggatgatggtaccagccgaacctatgcgccggcgggctatccggcctgcgccgacccgctgctgacctgggaactggtggcgcaggcgcggcaaatgaacatccccgccgcgtgcgggctggtgcgcagccacgacagtttctataccgatcgtgaggcggaactggatgcgcagtggtcggcgcgaggcgttctgggcgcggatatggagagcgccgctctgatgactatcggcgcgctgcgcggcctacgtacggcatcattactcaacgtggttgttgcccacaacggttgcctggatagcagcatcaatgattatgtccagcaggaggcgctgtgccagcagggcgaagaacggcaaattaccctggcgctgcgcgccatttattccgctagccagcaaggaggtctgtgatggacttttttagcattaacaatgtgatggtcaacattcctctcggcgaaggcggctatgcgctatcgtggattgaggctatcggtaccgtattcggcctgctgtgcatctggtgcgccagccgggaaaaaatcatcaactatctgtttggcctgattaacgtcacgctgtttgcggcgatctttttccagatccagctctatgccagcctgctgctgcaggtctttttcttcgctgctaatatttacggctggtacgcgtggagccggcaaaacgaggcgcaggaggccgcgctcaaggtacgctggctttcccgtcagcaaacgctggcgctgggcggcgtctgcgcggtggcgattgtgctgatgacgctgtttatcgatccggtgttcgcgacgctcactcgtatcatgattgctctgctgcaaacgttcggtatgcaggtcgcgatgcccgacctccagcccgacgccttcccgttctgggattccaccatgctggtgttgtcgattgccgccatggtgctgatgacgcgtaaattcgtcgaaaattggctgctgtgggtggttatcgacgtgattagcgtggttatctacgcggtacagggcgtttacgccatgtcgcttgagtatgtcctgctgacggcgatcgcggtaatgggctcatacagctggatcaaaagcgcacagcgtaacggctatacgccgcttgccgcggccgcatcctgattgaccgatttccaggctgcctgaatgggcagcctgttgctctctgtgcccctctttctgctacaatccccaccccgttcgaagattgagcaaaagactcccatgcgtttaaatcctggccaacaacaagccgtcgaattcgttaccggaccgtgcctggtgctggcgggtgccggttccggtaagacccgcgtgattaccaataaaatcgcccacctgatccgcggctgcggctatcaggcgcgtcatatcgcggcggtcacctttaccaacaaggcggcgcgcgaaatgaaagagcgcgtcgggcaaacgctgggacgcaaagaggcgcgcggcctgatgatttccaccttccacacgctggggctggatatcatcaaacgcgaatacgccgcgttagggatgaaatcaaacttctcgctgttcgacgataccgaccaggtggcgctgttaaaagagctcaccgaagggctgatcgaagacgataaagtggtgcttcagcagctgatctcgacgatctccaactggaaaaacgatctgcaaacccctgcccaggccgccgctggggcgaaaggggagcgggatcggatctttgctcactgctacgggctgtacgacgcgcacatgaaagcctgcaacgtactcgactttgacgatctgatcctgctgccaacgctgctgctgcagcgcaacgaagaggtgcgggagcgctggcagaataagattcgctatctgctggtggatgaataccaggacaccaacaccagccagtacgagctggtgaaactgctggtgggacagcgggcgcgctttaccgtggtcggcgatgacgatcagtcgatctactcctggcgcggcgcgcggccgcagaacctggtcctgctaagccaggatttcccggcgctgcaggtgatcaagctggagcaaaactaccgttcttccgggcgcatcctgaaggcggctaacatcctgattgccaataacccacacgttttcgagaagcgtctgttttccgaactgggctatggcgtagagctgaaggtgctctctgccaataacgaagaccatgaggcggagcgcgttgccggtgaactgatcgcgcatcactttattaataaaaccgcctataaggactacgcgattctgtatcgcggcaaccatcagtcgcgggtttttgaaaagatgctgatgcagaaccgcatcccgtacaaaatttccggcggcacgtcgttcttttcccgcccggaaattaaagacctgctggcctatctgcgcgtgctgactaatcccgatgatgacagcgctttcatgcgcatcgttaatacgccaaagcgtgaaatcggttcggcgacgttgaaaaagctgggtgaatgggcgatggggcgcaataaaagcatgtttaccgccagcttcgatatgggcctgacccagaccctgaacgggcgcggctatgagtctttgacccgctttacccactggctgcgggagatccagcagctttcagagcgtgaaccgattgccgccgtccgcgatctgatccgcggcgtggattatgaatcctggctctatgagacctcgcccagcccgaaagccgccgaaatgcggatgaaaaacgtcaatacgctgttcacgtggatgaccgaaatgctcgaaggcagcgagatcgatgaaccgatgacgctcactcaggtcgttacccgctttaccctgcgcgatatgatggagcgcggcgagtcggatgaggagacggatcaggtgcagctgatgacgcttcacgcgtcaaaggggctggaattcccatatgtctacctggttggtatggaagaggggctgctgccgcaccagagcagcattgatgaagacaacgtcgatgaagagcgccgtcttgcctacgtaggtatcacccgcgcgcagaaagagctgacttttaccctgtgcaaagagcgccgtcagtacggcgagctggtgcgaccggagccgagccgttttctgctggaactgccgcaggacgacctgatttgggaacaggagcgcaaagtgatttcgccggaagagcgcatgcataaaggccaggcgaacgtcgccaacatccgggcgatgctggcgaaagcgcgtaaatagcggctagcggctgttttgctgttgaatctggaactgacgtagcgctttgcgaccgggtgcgccgtctgaaccgggttgactgatgacaatggccgccacttcattgcccagccgcgttgcctgctgcaaatccattccacaggcaagcccggcgatcgtaccggcacagtggctgtctcctgcggcaatcgtgtcgtggaccttcacgcggcaggccggaatatgctgcggtgctgcgtcaggttcaaccacccatgcgccatccttatcaaaccgacagatcgcccgaatatgccagtcgctggcgagccgtgaggcggcatcaagggtcgcgctatccaaatcgtataaacgcgcgcacagcacgctgagttcatcgcgattcagggtgagcagggggcgtttgcgcagcagcgcctggataaagtgaatatccaggtcgcacagacgcgggccaaaatcgacgaacagcgttttatcttccgtctgggcaaggatccactggcgcagcgcttcgctggccagttcgtatcccgagacgtaaataatcgcctccttcggcagcggtatttgcgctaatagttcatcagtccagtgctgttcgcagccctcaatggtgataaacgtccgctctttgctggcttcgacaagagccagacaccagccgttatcgtgggtgggatggcgcaagaggacgggcaagttttccagcgccattttttgcgcaacggcctgcccccaatcgccattgcctaccggtatggcgttaatgggaaacagttcgaggcgcgagagcgcgcgggcgacgttgaacgcgcagccgccaatctgccgtccgccgtcgcgggcggagacatcgctaccgctttgcggcagcgcatcgagatggagaataatgtcgccaaaagcggcgccgataaccacgatcggccgctgaggcgatagcaggtcagcgctgattgtcacggcaggccccctttctcgttccgaaggcgagatacagcgccaggctcagaataaaagagacgaataacccgaggctggagtccgcgaaaataccgaccgcgaaaggtccgtcgataaaaccggttttagagaccatcaatcctgccagcgcaccgacaatccagcagcccagcgcggtacggtttgcgccgctctccctgaataaatcagcttcaggatatccggcacggcggcgcagccgataaaaatcgaccataaagatggcggcccaggcggccagaaatacgccgcagaaaatcaaaaacgcgatgaacggcccgagaaaatctttcgagacaaacagcacgtagagggcaatccccagcaccagcacggcgtcgagggccacggcagaacgctgctgtagcttaatccccatgcttaacaggttaaggctggcggaatagaggctcaacacggcgatggtcacgaccccggcggtagccgcggccagataggggatagccatccacgaaggcagcagtttaccgatcgctgaaatggggttctcgctggaggccagatcggggatctgcgcggtaagcagtattccggtgagcatcagcaacagaagcgggagggcggcgccgctgaccacggcgagaaaaataggcttttccccggagtcagggcgctgatcgcggctatagtcggcgccggcgatagctcagctgatgccggtgcccgcggcaataatagacacggccggcagaaagccggtcagccagctgcctgaaggcagcgcgaggatggcctgccagtccgcggtgaagagtaaatagatcaccaccagcagcgtcatggcgccaaagatccgggtgatccatttttgcatcatcagcacggcgttttgcccgagcacgctgaccagtacggtcagcccgccaaacaagaaaagcgacagcgcggtggtggtcagactctcttcaaaacccatggcggcaaacagcgcgacgagggtgagcgtgccggtaatgatattgaccgcttcccagcccatcaaattcacccaacagaagctggtgggggcgatattaccgcgtttgccaaaaatgacgcgggagagggttagcgtcgtcgtacgaccaattttcccggcgatgctggtgatgccgaccagcgcaaaggaggcgacgcccgccacggcggcaagaatcgcctgccagaatgagaggccgaacgacacaatcaccgcgccgtaaacgacgccaagaatgccaatattcgcggcgcaccagacgaaaaacagctggaccggtttctgggtctggtggaccggggggaccagaccgatccctaattctgccattccgggatctgccgcctggatatttccatcgtatgaagctttgctgtccatagtgataccctctgtgaattatgcgaagcggtagcctgcaagccgctgtgcgtaaggcgcgaagtcgatgctgttggcctgcttaatccgttgtatatgttcttcaggaaaagcctctatgccatgaagcgcgccgcagatggcggtggccatcgcgccaatggtgtcggtgtcgccgcctaaattggctgccagcatagcgcatttcataggctgcgtttttgccagctcaaccagagcaatcgctgcggggacggactcgataatatccataccggcgccgatgtcctcataaatccgttcaatacccgtcagatggtcagtctccccggcgatcgtttccagcgccaggtggatacggtttcccagtagtggactaaaagtggactcataatggcgctgcgtctcattggcgagcgacgccagctccgttttgattaacggccattcggccccttcaatggcgcggccgatcgcccaggcaatgaccaccgcgccggcgatagcgatgtctgatttatgcgtcggcaggcaggatagccgcacttgctcaatgaaaaacgttctgtccccggtgggcagtagacagcccatcggcgccacgcgcattgccgcgccgttggttacgccgttggccgcgatctcctccagcggctgcccctgttcaagcgcgatcagggaagccttcgaggtcgggccaagaatatttttttcaaaggcctgacagcgtctggcccacagcagaatatgcctggcgatgaccagtggatcggtcacgccgttggtttcattcagggcatccatgagtgcgatgcactgatgggtatcatcggtgaactcagcggcgcgaaattcgcaggccgcaatattctctttcggtccggggaggaagcgctcaatccagccaaaatggttaataattcggcgcttaggccacagttcggaaggcatacccatcgcatcaccgatggcttgcccataaaggcagccgaggatgcggttttcggtggtataggtagggtgaatagcagacatcatcggctccctggaagaaatgaataaaagttatactaaaagtagatccagattaagtcaagttaaagtcctttgtggccatgctgtgatcgaagacgcattctgaaagaaaagtgagaagctaaaaaagggtggggagacgttatgagggggctattgattccagtatggatccactatgataaatccactgccactgaattccggaagactacgacattatgccgcaatcgctgcttgagtatataaaagggcgtctgaatgcagaggctcccgcgccgctttatattcaacttaaacaagctattgaagcggcaatgaccgagcggttgctgacgcacggcagcatcctgccttccgaacgcaaaatgtcgcagacgcttgagctatcgcgcgtgacggtcgtgaaggcgcttgatgcgctgctggaggccgggctggttattaaacgccacggaaaagggactgaggtgaatctgccggtaagctataaccttgccagcggcggattttctgcccagctacaaaattcaggcacggtgtccaaccgatggctggtgagggaaaagctggcggcggatgattttctggcccgtgagctggagatcgcggtcggcgatcgggtggcgaaaatcaaacgcgtccgtctggtcgatgccctcccggtgtctatcgaaaccatgtttatccccgagcgtttcttaccccgcccggatctacttgaaggttcgctgtacgcgcactgggcggaaaatgatatttatcccgatcttcaggattactcactgacggtgcatattccttcggcggaagagctgaatttgctcgacctgccgcaaggcgtgccattgatgaaaattacgctgaaaagccgcaatgctcagggagaggtgcttgagtacggaaccgcattctgcctgagcaattactttaattttgatttcagagtgaagctgcaataagcgctttggcatggccggtgtataaaacccgccatcgctttatgcgagagcggatcgtagccgactactgctcgttaagccgcagcggccagtgaacgtagctctgccactggcactcctgttcgaccatttcccggcccagcggatgattctccagccagccctgcggcagcgttaacgtcaaattttcatcttcggcagccagcgtaagcatcggcagcagatcgtcgcgtcggcggctggcaaacagaatcgccagacgcagcagacggcacatatgctccgcgactctcggaggcaccgcgttttgttgatgaatggatgaaaggtcgacggcgttggtttggtttaacagcagcgtcgccagcagcttcttttgtgcgggggtaaagccgggcaggtcaagattgcgcaccagccaggcggcgtgcaggggggcctgcttgtactccacgctcagaccaatttcatgcagctggcaggcactttgcagcaaatcgaagcatagtggctcaatttcccagctgttttccacctgatgaacgaaatgggcggccagttgggcaacgcgctgtgcctgttcggtatcaaccagaaaccggcgctgaatattgcgtaaggtacgactgcgaatatcctgatcgattgacaggtgcagcatgccgtagaccagaccttcacgcagcgcgccgccggcgagcgtcatacactgaatattcagctcgctgaagatggccataagaatcgccagcccgctgggaaagacgagcgcccgttcaagcgtcaggccttcgatctccagctcttccagacgaccgcactgaatcgcgcgctgtttgagctgctgtagcttggctaaggtgatgcgttcatccatcccttgcgccatcatgatttcctgtaacgcctgaaccgtaccggatgccccgacgcacactttccagccgtgatagcgcagcacatcggcgacgggacgcaaaacttcacgcgctgcggtttcggcctggtcaaagttctctttggtcaggctgcgatcggcaaagtagcgttccagccaggtcacgcagcccatggacaggctgaaaagcgaggtggtttgcgcgccggtaccggtaaccagttcggtgctggcgccgccaatatccacaaccagacgctgatctgcgccgcctgttgtatgcgcaacgccctgataaatgaggcgcgcttcctcttcaccgctgataacctgaaccgcacagccgaggatttcccgcgctttctccagaaactcaccggcgttaaccgccaggcgcagcgtcgctgtggcgaccacgcggatttgcgtcggggggatatcctgcaaacgctcggcaaacaggcgtaaacattgccagccgcgctccatggcttctgccgagagcgtattgtcgccgctgaggccagcggccagacggaccttgcgtttgatacgactcagggtctggatgcttccggcaacctcgcgtacaaccaacatatgaaagctattggagccaagatcgatagcggcatagagcgaggtggagctcatacacttcatccttcaagttgcctctgtgttggctgcgttctcttacccgaatcacttaccagcgtcagctcgccgcgattcgctttcctgcggccttgatgcaacttgaatgattttgtgtatggcatagtgctttaacctgaacgacgacgattacgtggcggaccgttacgacgcgggccgttgcccgggcgcgggcgcgtaagacgtagcggtctgggcagttcagtcatcagcgcgtccgaattgtatttgctgaccggaattgaatggccgatataggtttcaattgccggcagattcagcgcgtactcttcacaggccaggctgatggagtgaccgctggcgccagcgcggccggtacggccaatacggtgaacgtagtcttcgcaatcgtccggcaggtcgtagttaaagacgtgcgtaacggccggaatatgcagaccgcgggcggcaacgtcggttgcgaccagaatgtcgatatcgccgcgggtaaattcatcgagaatgcgcaggcgttttttctgcgcaacgtcgccggttaacagaccaacgcgatggccgtccgccgccaggtgaccccagatatcttcacaacgatgtttggtgttggcgaaaataatcgcgcgatccggccactcttcttccagcagcgtctgcagcaggcgcattttttcttcgttggaaggatagaacagctcttctttaatacggtggcccgttttctgctcaggctcaacttcgacgtactcggcgttgttcatttgttcgaacgccagttcacggacgcgataagaaagggtggcagagaacagcatgttcaggcgctgattcgctggcggcatacggcggaacagccagcggatatctttaataaagccgagatcgtacatgcgatcggcttcgtcaagcacgacaacctgaatggcgccgaggttaatatggttctgtttggcgtaatcgataaggcgaccggtggtaccgatcagaatatccacgccgctttccagcactttcagctgcttatcgtagccgtcgccgccgtaagccaggccgagtttcagaccggtagcctgcgccagcggttcggcgtcagcgtggatctgaaccgccagttcacgcgtcggcgccatgatcagcgcgcgcggctggttgacctggcggtcagcgatcgccgggtgagtgagaagataatgaaacgttgacgtcagaaacgccatcgttttaccggtaccggtttgcgcctgcccggcgacatcgcgaccttccagcgtaagcgggagggcgagtgcctgaatgggtgtacaattatgaaaccctttcttttcaagggcttcaatcactgccgggtgcagggcgaagtcggaaaacttctgttctgttaaatgtgttttgctcatagtgtggtagaatatcagctaactattgcattaagaaagcgtatccggtgaaataacgtcaacctttcgttggctatgtatgaaattattcaaggtgcgtctgcggcaactgaacgaatcttcgaaagcttagactactaagcgaggcgagggtgacaaatctgcgataagccggtttgaacgctggttgctttatcttttgcggggcaaagttcatgatgggcattgtgatgcagagagataaaagaggcattctgaagaacagcgtgcataacgtagcatcgacacgtcgttgatggccgcgacaccaacacaccaggcttattcctgtggagttaaatatgagcgataaaattattcacctgactgacgacagttttgacacggacgtactcaaggctgacgggctaaccctcgtcgatttctgggcagagtggtgtggtccgtgcaaaatgatcgccccgattctggatgagatcgctgaagagtatcagggcaaactgaccattgcgaaactgaacatcgatcagaacccgggtactgcgccgaaatacggcattcgcggcatcccgaccctgctgctgttcaaaaatggcgaagtggcagcgaccaaagttggcgcgctgtccaaaggccagctgaaagagttcctcgacgccaacctggcgtaagcggcttgttctcccggcgtccagcgtccaattttttgcggatctctggacgcccggcgagagtcgtgctaagttaatctcagacttcgttttaaacatacctttgtttgaatcttgttttacccaaagcgtcccgcaaaaatgcgcgtgaggcttataatccgggcttatcactcattccgtttagtcgtttcagttctgcgttctttcctgtgaccaggcaacgtacagacacgagatgaaggccgttaacaggcatggatgttcctgccataccattcacaacattaagttcgagaattaccccgagtttaagaacccacaccattatgaatcttaccgaattaaagaatacgccggtttctgagctgattactctcggcgaaaatatggggctggaaaacctggcccgtatgcgtaagcaggatattatttttgccatcctcaagcagcattcgaagagtggcgaggatatctttggcgatggcgtactggagatactgcaggatggatttggtttcctccgttcagcagacagctcctacctcgccggtcccgacgacatctacgtatcccccagccaaatccgccgcttcaacctccgcactggtgacaccatttccggtaagattcgtcctcctaaagagggtgagcgttactttgcgttgttgaaagttaacgaagttaactacgataagccggaaaacgcgcgtaacaagattctgttcgagaacttaacccctctgcacgcaaattcacgtctgcgtatggagcgtggtaacggctcaacggaagacttaaccgctcgcgtcctggatctggcatcgccgatcggccgtggccagcgtggtctgattgttgcgccgccgaaggccggtaaaaccatgctgctgcagaacatcgcgcagagcattgcgtacaaccatcctgattgcgttctgatggtactgctgatcgacgaacgtccggaagaagtgaccgagatgcagcgtctggttaaaggtgaagttgtcgcttctacctttgacgagccggcatctcgccacgttcaggttgccgagatggttatcgagaaagcgaagcgtctggttgagcataagaaagacgttatcatcctgctcgactccattacccgtctggcgcgtgcctacaacaccgtcgtcccggcttccggtaaagtgttgaccggtggtgtggacgccaacgccctgcatcgtccgaagcgtttcttcggtgccgcgcgtaacgtggaagagggcggcagcctgacgattatcgctacggcgctgatcgataccggttctaaaatggacgaagttatctacgaagagtttaaaggcaccggtaacatggagcttcacctctctcgtaagatcgcagaaaaacgcgtcttcccggctatcgactacaaccgttccggtacccgtaaagaagagctgctcaccactcaggaagagctgcagaagatgtggatcctgcgtaaaatcattcacccgatgggtgagattgacgcgatggaattcctcatcaataaactggcgatgaccaaaactaacgatgacttcttcgacatgatgaagcgctcgtaagctaaaaacgccagagaacgccacgctattgcgtggcgttttgttttccgggtttgtatgatccaggaagggaaaacaaaatgggtcttaacgtatgatatgcgcaggatgatggcaggcagagacggctttaacagtctaaaatttctacaataaatttgtaatgttctgctttgccccttctggagttgaggcatcatcgttatacttcccggattaactatgctgagagcacatgcgttgtgaatttactcactgctattactgaattaatcagtattttcttattcaccaccctgtttatatttatcgctcgcaaggcggcaaaaagagttgggctggtggataaacctaactatcgcaaacggcatcagggtttgattccgttagtcggtggtatttcagttttcgcaggtatttgttttacgtttgctatcgccgattattacattccccacgctcggttatacctgggatgtgccggggtgctcgtgctggtcggtgcgctggacgatcgctttgatatcagcgtaaaaattcgcgcggtaattcaagccgctatcgccgtcattatgatgatggtgggtaatcttcatcttagtagcctcggttttatattcggctcatgggagctggtgctcggcccttttggcttcttcctcacgctgttcgccgtctgggcggcgatcaacgccttcaatatggttgatggtatcgatgggctgcttggcggtctatcgtcagtctctttcgcggcaacgggcattatcctgtggtttgatggccagtacagcctggcgatgtggtgttttgcgatgatcgccgccattttgccctatattttacttaacctcggtgcgcttggtcgtcgctataaggtctttatgggtgatgccggcagcaccatgattggcttcactatcatctggatcctgctggagaccacgcagggaaaaacgcatcctatcagcccggtcacggcgctgtggattatcgctattccgttgatggatatggtggcgattatgtaccgtcgcctgcgcaaagggatgagcccattctccccggaccgtcagcatattcatcatttaatcatgcgcgccgggtttacttcccgtcaggcgtttgtgctgatcaccctggccgccgcgctgctggccctggttggcgtggtggcggaatacacccgcattgttcctgaatgggtgatgttaatactctttttgttagcctttttcctttatggctactgcattaaacgcgcctggaaagtggcgcgcatggttaagcgcattagacgcagaatacggcgacacagcggcaataatccaaattaaccaagtcaatctggggacgtgatgactcaaccattaccgggagcacaaacagtgaacgttgagaacgagctggatattcgcgggctgtttcgcgccttatgggccggaaaaagctggatagcaggtatcgcagtgctctttgcactgattgttttggtttataccttttttgctcgtcaggagtggagcgcgacggcgattaccgaccgaccgacggtgaacatgctggggggatactattcacaacagcagttcttacgcaatctcgatatcaaggccaatctcgtctctgtcgatcagccttcggtcatggacgaagcatataaagagttcatcatgcagcaggcgtcgtgggatacccgccgcgacttctggttgcaaacagactactacaagcagcgccagtcgggtaacgctcgcgccgatgccgcgctgttggatgacctgattaacgatatccagttcatgcccggcgatgcgctaaaaagcatcaacgatagcgtgaagctgacggcagaaaccgcgcctgatgccaacaatctgctgcgccagtatgtggctttcgccagccagcgtgcggcagggcatctgaatgatgagctcaaaggcgcctgggccgcgcgtaccgtacagatgaaagcgcaggtgaagcgccaggaagaggtggcgcgagagattttcaatcgccgcatgcacagcgtggaacaggcgctgaaagtcgcgcagcagcacaacatctcccgcagcgaaaccgatattccaccagatcagctgccggattccgagctgtttttactggggcggccaatgctgcaggcccggctggaaaatctgcaggcggtggggccgcagtacgatcttgattatgaccaaagccgcgccatgttaacgacgttgaacgtggggccgaccctggacccgcgttttcagacttacaggtatttgcgaacgcctgaagaaccggtaaaacgcgatagcccgcgccgcgtgtttctgatggtgatgtgggggattgtgggcgcgctcatcggcgcaggcgttgcgttatcgcgtcgccgtgtccagtgaatgcggcctgtggtgaaggacatgtcgccttcatcgcctaatcgaagagaatcgatgtgaaagtactaacggtatttggcacgagaccagaagctatcaagatggcgcctctggttcatgcgctggcaaaggatcctcattttgaggcgaaagtttgcgtgaccgcgcagcatcgggagatgctcgatcaggtgttgaaacttttttctattgttccggaatacgacctcaatattatgcagccgggtcagggattgacggagattacctgtcgcatccttgaaggtttaaagccggtgctggagtcgtttaaaccagacgtggtgctggtgcatggcgataccaccacgacgatggcggcaagcctggccgctttctatcagcggatcccggtaggacacgtggaagccgggctgcgcacgggcgatctgagctcgccgtggccggaagaggggaaccgtacgttgaccgggcatctggcgacgtaccactttgcgccgacggaaacctcaaggcagaacctgctgcgggaaaacatcgccgacaatcggatcacggtaaccggaaatacggttattgacgcgctattctgggtgcgcgaccgggttttgagcgatgaagccctgcacaacgagctgactcagcgttatcccttcctcgccaacggcaagaagatgattctggtcaccggacaccgtcgggaaagctttggccgcggtttcgagcaaatctgccatgcgctggcggagatcgccgcgaacaatccggacgtacagatcgtctatccggtgcatttgaatccgaacgtcagcgaaccggtgaagcgcattctcggccacgttgagaacgtcatacttattgagccgcaggattatttgccgtttgtctggctgatgaaccgcgcgtggttgatcctgaccgattccggcggtatccaggaagaggcgccctcgctcgggaaaccggtgctggtgatgcgtgaaatgaccgagcgcccggaggcggtcagcgcgggcaccgtgtgcctggtgggtaccgatagccagcgcatcgtcaatgaggtcacgcgcctgctgcaagatgagtccgcgtatcaggccatgagccgggcgcataacccgtatggcgatggacatgcgtgtcatcgtattttgtctgcacttaaaaataatcaggtaacgctatgaatttttctaccatttcagtgattggccttggatatattggcctgccaaccgctgccgcgttcgcctcccggcaaaagcgggtggtcggcgttgatatcaatcaacacgccgtggagaccattaaccgtggtgaaattcatatcgtggagccggatctggcgagcgtcgtcaaaacggcggtcgagcagggctacctgagcgccactaccgcgccggtagaagccgacgcttacctgattgcggtgccgacgccgtttaaagacctgcatgaaccggatatggttttcgtcgagtcggcggcgaaatctatcgcaccgacgctgaagaaagggtcgctggttatccttgagtccacctcgccggtgggttcaaccgagcagatggcgggctggctggcggaaatgcgccccgatctgagcttcccgcagcaggttggcgaagcggcggacgtcaatatcgcctactgtccggagcgcgtgttgccggggcaggtgatggttgagctgattaaaaacgatcgcgtgattggcggcatgtcgccggtttgctcagcccgcgccagcgagctgtataaaattttcctcgaaggcgaatgcgtggtgaccaactcgcgcaccgccgaaatgtgcaagctgactgaaaacagcttccgcgacgttaatatcgcttttgccaatgaactttcgctaatttgcgccgatcaggggatcaacgtctgggaactgattcgtctggcgaatcgtcatccgcgcgtcaatatcctccagccggggccgggcgttggcggccactgcatcgcggtcgacccgtggtttatcgtggcgcaaaacccgcagcaggcgcggcttatccggaccgcgcgtgaagtcaacgaccacaaaccagaatgggtgatcgatcaggtcaaagcgcgggtcgccgactgcctcgccgccagcaacaaacgcgccagcgagctaaaaatcgcctgttttggcctggcgtttaagccgaatattgatgacctgcgcgaaagcccggccatggccattgccgcgcagatcgcccgctggcacggcggcgaaaccctggtcgttgagccaaatattcatcagctgccgaaaaagctcgacggactgtgcgctctggcgtcgctggacgaggcgctggcgagcgccgatgtgctggtgatgctggtcgatcataaagaatttaaagcggtcggcggggatagcgttagccagcagtttatcgtcgataccaaaggggtgtggcggtgagagggcgtctggtaaaagatgaaagcgttcgcagcttcgcgcgctttcatcgtgaccaaaacttaacagatctattttatgttcgcccgcgccagtattgagccccttgagtgggaaaaccgcttcttcggcgtcaatagcgccattctccgctttggcgacgatgcgccgccgctgacggtgcaagcgctggcgggatggtcgcgggtgcaggcgaaagttgcggcggatgataccgcgcgcctggatgcgctgcaggcattaggcttccggctggtggagggcgaggtcgatcttgcgcttccgcccgcggcttctgatgatatcggcgccgagccggcgaccgaggcggatatcccccggctgcgcgaactggcggcgctggcctttgcgcagagccgttttcgcgccccctggtacaccgacgatgccagcggtcgtttctatgcccagtggattgaaaatgcggtgcgcggtaccttcgatcaccagtgtctggtgcttcgcgcccctgacggcgatatccgcgcgtttgtctccctgcgccagctcagcgagcgcgaggcgaggattggcctgctggccggacgcggcgccggagcagaattaatgcaggcggcgcagcgctgggccgcgctgcgcgagctgacgacactgcgggtggcgacccagatgggcaacaccgccgcgcttaaacgttacattcttagcggtgccaatgtcgaaagcaccgcgtactggttatacaggtgacatgatgattccatttaacgcgccgccggtggtgggtaccgagcttgattatatgcagtccgcgatggggagcggcaagctgtgcggcgatggcggttttacccgccgctgccagcagtggatggagcagcgtttcggcaccgcgaaagcgctgctgacgccgtcctgcaccgcttcgctggaaatggcggcgctgctgctggatattcagccgggcgatgaagtgattatgccgagctataccttcgtctccaccgccaacgcctttgtgctgcgcggcgcgaaaatcgtcttcgttgatattcgtcgcgataccatgaatatcgatgaaacgctgattgaagcggccatcaccgagaaaacccgcgcgattgtaccggtccactacgccggcgtggcctgcgagatggacaccattatggctatcgccagcaagcataatctgtttgtggtggaggatgccgctcagggcgtgatgtcgacctataaaggccgggcgctcggcactatcggccatattggctgcttcagcttccatgaaaccaaaaactacaccgcgggcggtgaaggcggcgcaacgctgattaacgatcgcacgctgatagagcgcgcggagatcattcgtgaaaaaggcaccaaccgcagccaatttttccgtggcctggtggataaatatacgtggcgcgatatcggctccagctacctgatgtccgatttacaggcggcctatctgtgggcgcagctggaagcggcggagcggattaaccagcagcgtctggcgctgtggcagaactactacgacgccctgctgccgctggcgcgcgccgggcgtatcgatctgcccatcgtgcctgccgactgcgggcaaaatgcgcatatgttctatatcaagctgcgcgatattgacgatcgcagcaagctgatcgcctggctgaaagaggcggaaattctggcggtattccactatatcccgctgcacagctgcccggccggggagaacttcggcgagttccacgggacggatcgctacacgacccaggagagcgaacgtctgctgcgcctgccgttattctacaatttgtcgaacgttaaccagcgcacggtgattaactcgctgctgagctatttctcctgatatgtcgctggcaaaagcatctctgtggaccgcggcgtccacgctggtcaaaatcggcgccggtctgctggtggtaaaactgctggccgtgtcgttcggcccggctggcgtggggcaggcgggtaacttccgccagcttgtgaccgtgcttggcgtgctggcgggggccgggatattcaacggcgtcacgaagctggtggcccagcatcatgacgatcgccggcagttgaacaacgtcgttggcaccgcttcagcgatggtactcggtttctccaccctgctggcgctgatcttcctgctggcggccgcgccaataagccaggggctattcggtcatcaacattaccagaatctggtacggctggtggcgctggtgcagatggggattgcctgggcgaatttcctgttagcgctgatgaaaggctttcgcgatgcggcgggtaatgcgctgtcgcttatcgccgggagcctgattggcgtggcggcgtactatgcctgctaccgttttggcggttatcagggcgcattgctggggctggcgctggtgccggcgctggtggtggtgccggctgctatcgtactgtggcgtcgcggcaatattccgctaagcgcgctgcgcccgcgctgggacaacggcctggcggggcagctgtcgaaatttaccctgatggcgctgattacctcggtgacgctgccggtcgcctacgtgatgatgcgtaacctgctggcggcccactatggctgggacgcggtggggatctggcaaggggtgagcagcatctccgacgcctatttgcagtttattaccgcgtcatttagcgtttatcttttaccaacgctgtcccgtctgacggcgaaagcggatatcacccgcgagattggcaaatcgttaaaatttgtcctcccggcggtggcggcagcgagcttaacggtgtggctgctgcgtgatttcgctatctggctacttttttccgaccgctttacggcgatgcgcgatctgtttgcctggcagctggtgggcgatgtgttaaaggtcggggcttatgtttatggctatctggtgatcgccaaagcctcgctgcgtttttatattctgacggaaatcagccagttcacgctgttgaccgcattctcgcactggcttatcccggcgcacggcgcaatcggcgcggcgcaggcgtatatggctacctatattgtttatttcgccctctgcagcggcgtgtttttactttggcgtaaacgggcatgacagcactgatacatgtactgggatcggatatcccgcaccacaaccagaccgtgctgcggttctttaatgatgagctggccgtggatgacgaacaggctcgcctgtttatggtcgtcggtgatgcgacagaaatttgcgccgcttatcccgcactctccattcgctgctatccggggaaaaagtcgctggcaaaggcggttatcgcgctggcaaaggcgaaccggcagcagcgctttttctttcacggccagtttaataccggcctgtggctggcgctgctcagcggcgggatccgcccgacgcagtttaactggcatatctggggagcggatctgtacgagaactccgccagcctgaagtttcgcctgttttatcccctgcggcgcctggcgcagggccgggtaggtcgcgtgtttgcgaccaggggcgatctgagctggttcgccgcccgccattctggcgtagcgggagagctgctctactttccgacccgcatggatccggcgctgaattcgctcgccgatagcgcgccgcgcggcgacacgctgactatcctggtgggtaattccggcgaccgtagcaacgagcatatcgcggcgctgcgtgcgattcgccagcagtttggcgatacggttaacgttgtcgtgccgatgggttatccggcaaataatggcgactacatcaacgaagtccgcgcggccggcgcggagctgttcagcccgcagcatttccaggtattgggcgacaagctggcgtttgatgactaccttgccctgctgcgccgctgcgatcttggctacttcctgtttgcccgccagcagggtatcggcacgctgtgcctgctgattcaggcggggatcccctgcgtgctgaaccgggagaatcccttctggcaggatatgtcggagcagcatattccggtactctttaccagcgatgcgctggacgtgagcgttgtgcgtgaagcgcagcgccagctggccggcgtggataaaaatcaaatcgccttcttccggccgaattacctgacgggctggcgacgagcgttgcgaattgctgcgggggtggacgcatgacattaatgcaatttagcgggctgctgctggtctggctgctgtcgacgctatttatcgccaccgccacgtactttgaatttcgtcgcgtacgcttcaacttcaacgtctttttctcgctgctgtatctgctgacgtttttctttggcttcccgctgaccagtattctggtgttccgctttgacgtcgcggtcgccccgccggaaattctgctgcaaaccctgctggtttccgtctgcttttatgcggtttactacgtgacttataaaacgcggctacggtcggcgacgcacggtcatccgcatcgtccgctgtttacgatgaatcgcgtggagacccacctcacctggggcattttgctggggctggcgctgctttgcgtcggcatcttctttgcgcataacggcttcttgttattcaagctcaactcctacagccagatcttctccagcgaagtctccggcgtggcgctaaagcgcttcttctactttttcatcccggcaatgctggtggtctattttctgcgtcaggattataaagcgtggatattcttccttgtcagcaccgtcgcctttggcctgctgacctacgccatcgttggcggcacccgggcgaatatcatcatcgcgtttgccatcttcctgtttatcggcatcattcgcggctggatcagcctgtggatgctggcggcggcgggcgtgctgggcatcgtcggtatgttctggctggccctgaagcgctatggcatgaacgtcagcggcgatgaggcgttttatactttcctctatctgacccgcgacaccttctcgccgtgggagaatctggccctgctgctgcaaaattacgacaagattgagttccaggggctggcgccaatcatccgggatttttacgtctttatccccagctggttgtggcacggtcgtccgacaatggtgctcaataccgcgaactatttcacctgggaagtattgaataatcattctggtctggcgatttcgccgaccctgattggctcgctggtggtgatgggcggcgtctggttcgtcccgctgggcgcggtggcggttgggctgattattaaatggtttgactggctgtacgagcttggcaaccgggaaacgaaccgctataaagcggcgattctgcacagtttctgttttggcgctatcttcaacatgatcgtgctggcgcgtgaagggctggattcatttggctctcgcgtggtttttttcctcgttatctttgggatctgcctgctggcggcaaaactgctgtactggttccttgatagcgtggggctgattcaccggcgggccaaaccgctgacgcaacctcaagtctgataagggtgtacatgactgagaccacatccgcgccgttgtacctgctgagagggctacaactcattggttggcgcgatatgcaacacgctctggattatctgtacgccgatggtgagatccgcacgggaacgctggtggcgattaatgcagagaagatgctggcggtagaagacagccccgaagtccgggcgctgattgaagcggcagaattcaaatacgctgatggcatcagcgtagtacgttcattacgtaaaaaataccctcaggctcaggtgtcgcgcgtcgccggcgccgatttatgggaagccctgatggcgcgcgcaggcgctcagggaacgccggtatttttgatcggcggcaagcctgaggtgctggcgcagacggagcagcagcttcgccagcgctggaacgtgaatatcgttggaagccaggatggctattttgccgctgaccagcgtcaggcgctatttgagcgtatccgcgatagcggggcgaaaatcgtcacggtggcgatgggctcgccgcgtcaggagatcctgatgcgcgactgtcgggacgtttatccgcaggcgctgtatatgggcgtgggcggcacctacgatgtctttaccggccacgtccagcgggcgccgaagttctggcaggacctgggtctggagtggttctatcgcctggtttcgcagccgagccgcataaaaaggcaggcgcgcctgctgcgctatttacgctggcattacaccgataagctgtgacattccactgcaagcgggcgggtttacctgggtattctgtgtaatgtcttcactcgcctgatactttatttgccatttccctcaaattcattaaccattcgcatgcttaaaacgcgacggtcagtttaccgtcgcgcaggcagggctatttattcaataaaaataaccggcatagacacatcccggttgggatgcgcttaaacccggagcagggcaaacacaagaggctatatgactgagaaaaaagcggaacttcagcggggactggaggcgcggcacattgagctaatcgctcttggtgggacaattggcgtcgggttatttatgggcgcggccagtacgctgaagtgggccggaccttcggttctgctggcgtatattatcgccgggctctttgtcttcttcatcatgcgttcgatgggcgaaatgctgttcctcgaaccggtaaccggatcgttcgccgtttacgcacaccgctatatgagcccatttttcggctatctcaccgcctggtcctactggtttatgtggatggcggtcgggatatcggagattacggctatcggggtttatgtgcagttctggttcccggatatggcgcagtggataccggcgctgattgccgtcgggctggtggcgctggcaaacctcgcggcggtacggctgtacggcgaaattgaattctggtttgccatgattaaggtcaccaccattattgtgatgatcgtggtggggctgggcgttattttctttggctttggcaacggcgggcacgccattggctttggcaatctgaccgagcacggtggcttcttcgccggcggctggaagggcttcctgacggcgctgtgcatcgtggtcgcgtcttatcagggcgtcgagcttatcgggattaccgccggtgaagcgaagaatccgcaggttacgctgcgtagcgcggttggcaaggtactgtggcgaatcctgattttctatgtaggggcgatttttgtgatcgtcactattttcccgtgggatcaaattggctccaacggcagtccgttcgtactgacctttgccaaaatcggcatcaccgcggcggcgggcattatcaactttgtggtgctcacggcggcgctttccggctgtaacagcggcatgtacagctgcggccgcatgctctacgcgctggcaaaaaaccgtcagctgcccgcggccatcgccaaagtttcgcgcaacggcgtgccgtcagcgggcgtggcgctgtcgatcctgattctgctggtcggctcgtgcctgaactacattatccctaatccacagcgagttttcgtctacgtttacagcgccagcgtgctgccggggatggtgccgtggtttgtgattctgattagccagctgcgttttcgtctcgtgcataaagaagcgatggccagccatccgtttcgctcgctgctgttcccgtgggcgaactatttgaccatggcattcctgatttgcgtgctgatagggatgggatttaacgacgatacgcgtatgtcgctctttgtcggaatgattttcctcgccgccgtaacgcttatttataaggtatttggccttggccgacgcggaaatgttgataatgtggcgcaataagcaacaaaacgcacaaagcatgagcaaacaataattttctttaaaaaggcactagacagcggggtaggaagtccgtattatccgaccccgcaacggcgctaagcgcccgtagctcagctggatagagcgctgccctccggaggcagaggtctcaggttcgaatcctgtcgggcgcaccatttacccggtgctggagctgcggtggtttcaataccgcgtaaaagatttgcagtggtggctatagctcagttggtagagccctggattgtgattccagttgtcgtgggttcgaatcccattagccaccccattatttagaaagttgtgatattgcgaaggtggcggaattggtagacgcgctagcttcaggtgttagtgttcttacggacgtgggggttcaagtcccccccctcgcaccacgactttataaagaattgaactaaaaattcaaaaaagcagtacatcggcgagtagcgcagcttggtagcgcaactggtttgggaccagtgggtcggaggttcgaatcctctctcgccgaccaattttgaaccccgcttcggcggggttttttgttttccgcgtctgcaaaaacgttcctatctccctgatatcgcaaaaaatatctcgctaatcagcatgcgatttattgtccagaatagtcccaattccttgtgcggatagatgcattttctaccgatcctgtgcgataataaacgggtagatgctcattccatctcttatgttcgccttagtgcctcataaactcaggaatgatgcagagccgttttacggtgcttatcgtccactgacagatgtcgcattttatatgctaaatcattcatgatgtgtcgagacggccagcacgggaatccccccggagcttacaaaggtaagtgactggggtgagcgtgtgcagccaacgaagagacagcgtgaaggatgaagcatatagcctcatcaaacaccatggacactacgttgagtgaagcacccaatttgttgtcaaacagacctgttttaacgcctgccctggtttcagagcaggcgtttttttcttttcagggatagagaaacgctcaggcgggaagagaagagattctcgcccccgatggaggcgagaagggcattactgctgcgggttgttttgcagggttaacagcaggccgtcgcgacgcatcgtcgccgcttcttccggctgatgcaggcgatcaagtgtatcggccagccacgcgtagtcaaacgcatccgggcgctgcttgagcgctgcgcggaacgcgatgctggcttcctgccactcgccgtgacgcatgagcgattgtcccagcgtactccacagcagcggacggtcgccgaccgttttgatctgctggcgcagcaccttttccagctgttccggattattcgttttcagccgcgggatcggcatcaccagacgatcgtcgtagtgctttttcagaccttcgataataatctgctgcgcggtatcatggtcgtcgctttcgataaggcgattagccattgccacctgtagcgccacctggctgcgggtttttcggttctggcttttccaccagtcgcgcagaccttcgctgccgccgtcggccagcgttttatccatcaggccaatccacgccagctgttccagttcggcacggtgctcctcatcgctgacgttggctttcgccattgatggaatgatatccagcagcgaattccaggcgccggtacgaatgtaggcctgctcggcgaggcgcaggacctccggatgacgcggcgtgatctccagcagcttgtcgatgccgtggcgggcggcgtggttttcattacgcgccagctgcaggcgtacgcgggtgatttcgacaggtatcaggtcgtcgccggcgagctctgtcgcgcgctccagatgctggttggcgcgggcttcatcgccacgctgctgggcggcttctgccgccagcaggtagttcacaacgggctgctcagcgtgatcggcatttttcgccatcagcttctcaacctgctgataatcgccctccgccagcttcagcagcgcctgctcggtttgcttacgcgcgcggcgacgcttgcggcccacgaaccagccgcgggtatgtgcgccggtgcggaaaatgcgccgcagcagccactcaatggcaaacagcactaccatggtgaggatcatgatgatcgctaacccggtgacgctggtttcaatgttgtaattatcggtctggatcaggacgtagccctgatgacccgcgatcatcggaccgaccacgatcccggcaagcagcagcgcgaagagtaagagaattttcaacatgcgttactctccttgtggcgcaggcgttggcgcgtgggcagcaggtgccggcgcgggagccggggcgctggcctgggtttcagccggctgcgccatcagattacgtacccgcgtttgcatcagtttctcaagcagcgcctggctctgcaggctctccggtacgttcatggtgatgctttgctggctgagcttatccacgtcctcaaggaaggctttggtggtggcatcttcagtgtcgtagtaagcacgaacccacgtcgagacgttatccagcgcctgtttgtaggtttcttcctgatgacgcggaaccgcctgcgccgcgaccagcagacgggagcggatgttttcgcgcagatagacgtcctggtttggcgccagcagcggcacggcggtctcatcgcggcggcgaacggtaataaagctgtccataaagttctgccagcttttttgcaggtttacccgccactcgctaatggagctggatagctcatcgctatcggaatccatcggggtatcatcgtcgttgttgtccgccaggcgtaaattatcgatctggttggcgagctggttcactttcagaatgatgccgtcgtagtcgacctgactcacggcggaaagcgaagcaatatcgtcggtaatggcgcgacgggcggaaatcaggctcggatcgttcatatcggcgaggctggcgtcggcgcttttcagcagcgcggcggcggtcgtcacgtcctgatcgctccacagcttacgtccggccagttttacgaggaaatcagcctgcgcgagcagccaggtttttgcatcgctgccggaaatgaccgcgaccttctcctgcacttcttccagcttcttcgccagagaatcctgctgacgctgcgcttccgtcagctggtcggcctgctgcttgatgatgccttcaagctcgcttttttggctctcctgcgctttttgcagcgcggcgatctggctggatagcccggcgctggcttcgctctggcgggttgcctgagtcttcgtcagaccataaaggcctacgccagcggcgagggcgatagcgatagctatagcgctcagggcaaggctggttttactgccgccgtttttcttttcgacattcttctctggctgtggcgtcgtttccacggcctccctggtctcttcaaccacggcggattgattctgttgttccgtcattatggcttccaatgttgagagttattgtaatgcgcgtagcagcgcatcgttgtcggcgctatcggcaacctggatatcctgccagcccaattccctggcctgctcggccagacgttcactgacaacgaaaatgcgacagctcaggagccaacgttcgcgataccactgtggtattagcgtccagagctgctgcagcatctcgccgctggtgatgaccagcgtcgaaaccccgcgagactgccagcgcattgcttcttctgcgccatcgtagtgccttgcactacgttgataacattcacaaaaagtgacatcagcgccgcgttcgcgaagcgtgtcaccgagtaattcccgcccgccgttgccgcgcaggatgagcgcttttttccccgcaatgttttgtaattcaggtaattgtagcaagacttcgctgatttcccgatctaacgggtagcgaacttgtcgattactgaccttatgcagggccagcgcggtggtgcggccaatggcaaaatagtcgggcgccgtgggccagcgcagcccctgctgctggaggcgagcgtgggcaaactcgacggcatgctgagatagcgcgaagagtaaatcgcctgcggcgaggcttgccagctggccgcccagctcagggagctgacggcccggggtaaactcaatgagcggaaagctccaggccacgcgtcccagcgcgcgcaggcggctgactaactcttcgccttgcggcagcggacgggtaaccagaatgctcattgaggcgcttctcctgcgtagacgacggcgagaatgtcgcgagcgccgttatccagaagttcttcggcaagggcgacgcccagcctttcggcatcttccgggcaaccgcgccgctcgccgcgtaccgtgtgtgagccatccggcgcgccaaccagcgcgcgcagccatagctcaccgtcgatcagttcggcatagctgccgataggcacctgacagccgccttcaagccgggtgttcatcgcccgttcagcgcggacgcggatggccgtttccgtatgattcagcggggccagcagcgttttggtccattcgtcgtcaaggcgacactcaatgccgaccgcgccctggccgacggcgggcagagattgctccggggacagcggttgacgaatacgcgcctcaaggttcaggcgcttaagtcctgcggcggccagaataatggcgtcgtactcgccgctatcaagcttgcccagacgcgtgccaacgttgccgcgcagggagcggatcgtgagatccggccgcgcggcggccagctgacactgacggcgtaaacttgaggtgccaacgatgctgccgtgggggagttcatcaatggaagcgtagtgattcgagacaaaggcgtcgcgcggatcttcgcgttcacagatggtcaccagccccagcccttcgggaaactccaccggcacgtccttcatagaatggacggcaatgtcggcgcgaccttccagcatggccagctctaactctttcacaaagaggcccttaccgcccacttttgcaaggggcgtatcaaggatcacgtcgccgcgggtgaccataggcaccagctcaacggaaagccccggatgacaggactccaggcgctctttcacataatgtgcctgccatagcgcaagcgggctttgccgtgtggcaattctcaaaactttgtctaacatgcttgttaccgtcatagtcgaccactaaccatcctaacattgttgtcttagggatgttagttttgtggggttaagggtcgcggccatttttttagcctttcatgcgtttgcgggttgccgcaaacgtagtgaagaatttacacgtagtaaagggtgctacacttgtatgtagctcatctttctttacggtcaatcagcaaggtgttagattgatcacgttttaaaccatttgtcagtcagcagttcatcacaaccacaccgacgacgaatggtgacggtttttgttgaaatactgaaactctccgtactattgtacgtcgggtttttgaacatcaggcgatatgtcttgtacctctatattgagacactgaaacagagactggatgccatcaaccaattgcgcgtggatcgcgcccttgctgccatgggacccgctttccagcaggtttacagtctactgccgacattactacattatcatcatccgctgatgccgggttaccttgacggtaacgttccccgtggcatttgcctctacacgcctgatgaaacccaacgtcactatcttgatgaactcgagctcaaccgtggaatgctggccaaagagccgccgaaaggcgagctgccgattaccggcctttactctatgggcagtacttcttccgtcggccaaagctgctcttccgacctggatatctgggtttgccaccaatcatggctggatagcgaagagcgccagctgctgcagcgcaaatgtagcctgctcgagagctgggccgcgtcgctgggcgttgaggtcagcttcttcctgatcgacgaaaaccgcttccgccataacgaaagcggcagcctgggcggtgaagactgcggctcaactcaacacatcctgctgctggatgagttttaccgtaccgcggtgcgcctggccgggaagcgtattctgtggaatatggtgccgtgcgatgaagaagaacattacgacgattacgtgatgagcctctacgcgcagggcgtgctgacgccgaacgaatggctggatctcggcggcctgagctccctctcggcagaagagtacttcggcgccagcctgtggcagctgtataaaagtatcgactcgccctataaggccgtgctgaagacgctgctgctggaagcgtactcctgggagtaccccaacaaccgtctgctggcgaaagatatcaagcagcgcctgcatgatggtgaaattgtatcgtttggccttgacccttactgcatgatgctggagcgcgtcacgctctatctgcaggccatcgaagatgaaacgcgcctcgatctggtgcgtcgatgtttctatttaaaagtgtgcgagaagctgagccgcgagcgcgcctgcgtcggctggcgccgtgaagtcgtcagccacctggtgaaagagtggggctgggatgaaaagcgtctgatgatgctcgataaccgggccaactggaagattgacgaagtccgtaaagcgcacaacgaactgcttgatgcgatgatgcagagctatcgcaacctgattcgctttgcgcgccgtaataacctgagcgtttccgccagcccgcaggatattggcgtgctgacgcgtaagctgtacgccgcctttgaagcgctgccggggaaagtgaccctggtaaacccgcaaatttcgccggatctgtctgagccgaatctgactttcatccacgtgccgccgggccgtgccaaccgtaccggctggtatgtctataaccgcgcgccggacatggaatcgatcatcagccatcagccgctggaatataaccgttatcttaataagctggtggcctgggcctggtttaacggcctgctgacgtcacgcacacgcctgtttattaagggcaacgggattgtcgacctggcgaaactgcaggagatggtggccgatgtggcgcatcacttcccgctgcgcctgccgtctccgacgccgaaagcgctgtatagcccctgcgaaattcgccacctggcgattatcgtcaacctcgaatatgacccgacggcggccttccgcaatcaggtggtgcatttcgacttccgcaagctggatgttttcagcttcggcgaagagcaaaagtgcctgattggcagcatcgatctgctgtatcgcaactcgtggaacgaggtgcgcacgctgcactttaacggcgagcaggcgatgatcgaagcgctgaaaaccattcttggcaagatgcaccaggacgccgcgccgccggatagcgtggaagttttctgctatagccagcatctgcgcggcctgatccgcactcgcgtgcagcagctggtgtctgaatgcgttgagctgcgtctttccagcacccgccaggataccggccgttttaaagcgctacgcgtttccgggcagacctggggactcttcttcgagcgtcttaacgtctcggtacagaagctggaaaacgccatcgaattctacggcgcgatttcgcataacaaactgcacggcctgtcggtgcaggtggaaaccaaccacgtcaggctgccgcaggtggtggatggttttgccagcgaagggattattcagttcttctttgaagatgcggataacgataacggatttaacatctatatccttgatgagagcaaccgcgccgaggtgtatcaccactgcgaaggcagcaaagaagagctggtacgcgacgtcagccgcttctactcttcgtcgcatgatcgctttacctacggctccagctttatcaactttaacctgccgcagttttatcaaatcgtcgacgtcgacggccgcgaacaggtgatcccgttccgcagccaggtgattgccgcggccacccttgctgcaggtgaggattccgcgacatcatcgatgttgcagcactactcatgacccgccgcgtagacctgtcattcggcgcaggtaaatttcccgggggcgcttcgcttgcccgggcttcgtggtgatatgggttttgtcgcccggatacggcgttagccgcaatccggggaactcgagtcacgcgcgtttagcgaaaactcaccgcttcaccggcctgcgcggtcgccgcctgttccagcagatcccagaaggtttcgccgctgcggtcgcatacccactcgtcgcctttcaggtcgaaatggtagccgccttgttttgtcgccagccatacctggtgcagcggctcctggcggttgataataattttgctgccgttttcaaagctgatagtcagcacgccgccgttgatttcgcagtcgatatcgctgtcgccatcccagtcgtcgagacgctcttcgatggtcatccacagggtatcggccaggcgatggaattcactgtcgttcatggttctttcccgcttttttgatcgtggcggcagtatagcgcaatctacgatgacttcggcagatggcgaaggcggatcagcagtagagacgtcacgatcgccatcgccagcagcccgtaacgcgcgctcagcatccggctctgttgataatgctgaagaaggccagagagatcggcgggcgccaggttttgtgtctggatcagctgatggaaagtccgatcgctcgtccaggggataaacgtgagatggccgatggcctgtcgggcggccaggcccattgccgggtcgtgctgtacctgatatttcatcaggaaggtcaacaccgtgagcatgacggtactgattaacgccattcctaatgcctgcccgatatcgcgcgaggcggcctgaacgccgccggactgttcggcgtgccgattccctgcgccagtggtgaccagtatcggggcattggccgcgatggtgcccatccccgcgccgattaaacaaagccctgacgccatcagtacaggggtaaaccccgttacgtgcagcgccgcggcggcgaccagagcgccggcgattcccgccgtcagccccatctggcactggcggcgagggtttcgctgctgaataaacagcggcaggcccagcgaacaggcggcgagacatatcgcaaaagggagtatcagcagccctgtttccatcgccgatacgcttttaacaatctgcgcaaaactcaccacggtaaaaatagccgaactgtaggcaaaaaatatccaaccggtgagatagagcccgtggcgcaccaggcgggttttcaggaaaaccgcggggagcagagcgtggccggtggtggcttcaaaatgacgttcccagcgcagcatcatcatcagcaccatcaggccgcagagaataacgaaaggggcggggctcaggccgagaacgctcactgccgggtcgaagggcataaccagcccccagaccgggatgcgcagaataccgaaaatcgtcaggaacagccccagggtgcctaacagaaagcccagggtatcgaaggcgatagcggcgcgtttgttttctgatgccgggatgatgacggagcagagcaggataagcagcgccagcaggccaagcgaggcaaacgcgatgcgccagccgacgtggtccagcaaatatccgcatacaattggaccacaggcgaatgaaatgccgctggaggcgcccagcgcgccaaaggcggcaacccgtcgtcgctgctgatacagggcagagatcaggccaaaaacggcggggatcatcaggctaccgcctatcccggcggtcagacgcgcgccccaggtaaagagcgcgatcgatggcgaaaaaaaggcgcaggcttcggcgaggataaaaatcaggcagccgatgcgaaacagcatccgccaaccccagatacaccccagcattccgcctgccaccataaacgtgcccgcaaccaacggatacatggtattcgctgtactgacctgcccaagcgtggcgtgcagatcgttcattagcgcctgcgtggcgatacttaacgtcacgttatcggcggaagccagaaactgtgcgcagcataagacaaccaaaggtaaccagtttgtcggtgtagggttggtggtcacagcgtgttcctttttgatagaaacgacaaaacgcgcccttcctcgcgggaggggcgcgttattgttagttatctttcgatcttaactcagattttcgacttcttcgcacgcggctcttctcctgctgcgtcatcagaacccctggcgcggacgggaagattgcgcgtcccgaataaaaacagcagcgtcatgaccgcggtggcgaccatccccgctcgcgtggctttcaggcgggcggttttatagacctggttgagttccgttacatccttctgattcacgccctggtccagcatcagcgttgagaaacccgtatcgctgagataaggaataacggaaagatttgccaccttctgctgtgtatcctggcttagcgaagagtcgtggctggccatatcctgtaccgtcatggtgaccgccgtcagcatcaccataccgcaaaccgccacgccgattgcctggccgacgttacgcgaagtcgcctgcacgccgccggactgctgcgcatcgcgcgccggcagggcgctggtaacaatatagctggaataggcggaaacgatgcccatactgatgccaatcagacacatccctaccggcacgatcatgctgaaatcggacgggccgaagccgaagatgcacaacacggagcccagcgtgccgatgagcagcgcgctctggcacatccgtttcggattcgcgtttttccagacgatcggcagccccagcgaaaagaccacgacgcccagcgcaaacggcagaatgagcaagccggtttcaataccgttcagcccggcaaccacctgtacaaagctcacggtcacaaaaataccggaaccgtaggcgaggaagataaacgccgtcagatagagaccgttacgcacctgcggcgttgcgaggaacgacagcgggatcagcgcgctgccggtggtggcttcgcgatggcgctcccacttcagcataatcgccagcacgatcaggccaaacaggacgaggaacggcgccgggctaagacccatgacggtgaacggcgcgttaaacggcgtaaacagaccccagctcgagactttcaggaagccgaggatcacgctgaacaggccgataacggtcaggacgacgcccggcagatcgaacaccactttgcgttcaggttttgccggcgtagggacgaggaaagagccgctgaagatcacgatgcacaggccggcgatagcggcaaacgcggcgcgccagccgaggtggtcaaccagcaggccgcaaatcaacggaccggcggcgaaggagacgccgcttgccgcgccgatagcgccaaaggcgatcgcctgctggcggcctttatagttactggcgataagccccagcaccgaagggatcataaagcttccgccaataccggaaagcagacgggcgccgtaggtgaagaccagcatgttcggtgagaaataagcggtcagctcggcaagaaacagcagcgcgcagccgatgcggaaggttttcttccagccgacgataagcccggccatcccggcggcgaccatcagagagcccgcggccagcgaatacatcgcgttggcgatgctgatgagatccattgacgcgtgcaggtctttgaccagcgcgccggtagcgatgctcagcgtggcattatcgccggatgtcgaaagctgagcgaggcacagcaccagcagcggcaaccatttcatcgccgtatcggcggccgcgttgcgcgacatgccgggagagttaattactgaatttgtcgtcatgatcgtgttctgtggttaatttcaggcaatctacacatcatccttcaagctgcctctgtgctggctgcctgcgttcaccccggtcgcttactgtagtaagtgaccggggattctctcaggtgccgccttgatgcaacgtgaatgattttgtgcaatagctatccgcccgacgccgccgccgggtggataatgttcgcaacaggattactggatttgctgtttcttaccgcccagcacggtgccccagaccttcacatctttaagctgaaccggctcgatggcctgcggatcgtcttccagcacggtgaagtcggcgtatttaccgcattcgatgctgccgatcagatggtccattttcatggtccatgccgcgccgagggtcatcgcgtgcagcgcttgatcgacggagattttttccgcttcgcccagtacgcgcccggatgccgtcaggcggttcaccgcgcaccagccggtgaacagcgggttgatgggggtgatgccgcaatcgctgtggaaggcgaaaggaataccgtggcgcaccgcgctgccgcaggcgtccatacgcattgcgcgctccgggcccatggtttggctgtagtgctgatcgccccagtaatagacgtggttgctgaaaaaattcacgcccatacccatctctttgatgcgtttgaactgatcttcacgcagcatctgcgcgtgctgcatcaccgctcggtggttcactgccggaatacgattcagggttttctcgacggctttaatgaacgcttccgaggcctcgtcgccgttacagtggcagtgaacctggtagccgcgggacatgatgtcgtagacctgctgctccacctcttccggcgtggcgttccacgcgccgttgtggccatccagataatagaagggctccagcatccgtcctgacccaccctggatagagccgtcgaggaagattttcatcgggccgaagtgcattttttcgtgcccgtgacgcataacgtccggggcgaaatccagcgcttcctggaagggttttttgacgaaaggaggaccgtaggccaccagcagacgaattgggaagtcctcttcacgggtcatgcggatgtagttggtcatcagctcgggattgctgaaatcggtcagacccatatcggctgcgctggtgcagcctgcgcgaaatgcttcctggccgaaattggcgatggcgatttcggtggtgagttcgtcccagaaaccatatttattcaggattggccccatggcggcgaactccaccagctcgccgtgcagcgtaccgtcctgatttttcaccacgccttcaatctggcaatcgtcaaatattccgcagtcgtgcagcgcggcggtattggcgcccatcaggtggatgctcatatggataaccgcgaccggacgggtggttgagacgcggtccagatgttcgcgacccagcttttcgctgccgaaataaatgggatcaacgccccatgcgatcagcggcgcgtgcggatcggtcatctcacgttccaccgcctgcagcgcgctgacgacgtcgtcaaaagagcggcagcctttccagactttaccggtatggtccgggcgatcgtagtaacccacataggggaattgccacataccgccgccggtgacgtgcgagtgggcttcaatcaggccgggcattaacactttatcggcaaaggtctcgtccagctggtattcgccaaagccggtgagttcttcaagcgtgccggtgcctaaaatacggtcgccgcgcaccgcgacatgggtggtctccgggcggttcgggcacatcgtaatgatttttttagcggcaaaaatcgtgatttctgatgctgacatagtaggctcaatcattgagggttcagagagcgatgaaaggcgtcgctttcatcatgagtattaatgcgcctatgctaattgtcatattggatgtataacaggaccaaaaacccacgatattaaggtgccaatttgtcggttgctctgccttttgatttaacgggtataaagctggatgctggcagaaagcgtagcgagcagctttatcgcgccctgagagagaagatggtgaatacgcccggtcttcacggggctaaactacccgcgacgcgtgagctggcgcggctgctgggggtttctcgcaatacggtggtctcggtctacgagcgtttatatgccgacgatttgattgaaacccgacagggcgacggcacctatatacgttatcgcgggcaggaggttgacgaaggccccgacgtccctgaaattcctgccttacgcgtcgactcgcgcctgccgctgacggcgcggtttaatcgccattttgtgcacgatggcccgccgaaggcttttcgcatcggcatgcccgcgattgaccatttcccgtttgatacctggtcgcgcttgcaaaaccgcttctggcggcggcgacccattgcgcaaatgggttacggcgttccggcgggcgatttacagctgcgcgagcttatcgccagctatctgcatacctcgcgcggcctgaagtgcgatccggctcaggtgattattacccttggcgcacaacaggcgataatgctctgttccgcgctgctgctgcgcgtcgggcaggacgtcattatggaaaacccctgccactgggcggcggcgggcgtattctcctgccttggtttgaatattaaagcgattaacgttgatgatgaggggcttcagacggcgcagttgacggattatcccgacgcccggatggtctacgtgagcccgtcatgccagtacccgacgggcgcgacgctctcgctatcgcggcggatgacgctgctggagtgggccagaaagcatcaggcgtggattatggaggatgattacgacggcgagtatcgctataacggcacgccgctgatgccgctcgccgcgctggataaccgccatcgggtgatttatatcggttcgttttccaaagtgatgtatcccgcgctacgcctgggctacatggtggttccgcaacagctggtggaaccgctgaacctgctgcgtacgctatccacccgccagccgccaatgaacgaccagcaggtgatggcgagctttatttcggagggtcatttccagccccatatccggcgaatgcgcagaatcagtaaaagccgtcgcgatctgctgctggccgagtggaatcagcatctgagccatattggcgtgatgccggaagtggcctcggggttacatgcggcgattacgctggatgatgctgaaacagaaacccgtctcgttagccaggcccaggcggcaggcgtggaaattacgccgctgagcgcattgtggatccccggtacgcctgaaagccgccatcattacggcgtggtgctgggatttgccggcgtgatggaagcggatattgtgcagtcgatacaggcgctaaaaaaatgctggcagtgaccctgctaaaatgaatcatcagcgtatatctaccaacgcgtttgcgctgtaaccctggtggaaagccgcttttcagatgtcataaagctgccctaaacgcttgcttttacgtcttctcctgcgatgatagaaaacagaaagaatgaattacgggctactatccatgaaaaacgttttcccagcgcttgccgttttatttgcggtcctcagcctcaccggctgtggtctgaaagggccgctctatttcccgccagcggataaaacggcgcctccgccgactaaaccggttgatagcggtatccagagctctacgccggatcgtaacgatcgcggtgatagcggtggtccgacccaggtgaattactgacagttccgcgctgctggagtagatgatgcagttctctaaaatgcatggccttggcaatgactttatggttgttgacgcggtaactcagaatgtttttttctcaccggaactgattcgtcgtctggcggatcggcatcttggtgtgggcttcgatcagctgctggtggttgagccgccctacgatccggagctcgacttccactatcgcatcttcaatgccgacggtagcgaggtggcgcaatgcggcaacggcgcgcgctgtttcgcccgctttgtgcgcctgaaaggcctgaccaataaacgtgacatccgcgtcagtacctcgaacggccgtatggtattaagcgtaacggaagacgatctggtgcgcgtgaatatgggtgagccaaacttcgaaccgtcgcaggtgccgttccgcgccaacaaagcggaaaagacctatatcatgcgcgccgctgaacagacagtattgtgcggcgtggtgtccatgggcaatccgcactgcgttatccaggtcgatgatgtggaaaccgcgacggtggaaacgctcggcccggtgatggaaaaccacgagcgcttcccggagcgggcgaacatcggctttatgcaggtggtcagccgctcccatattcgcctgcgcgtgtatgaacgcggcgcgggtgaaacgcaggcctgcggtagcggcgcctgcgcggcggcggcagtcggtatccagcaggggttactgggcgaggaggtccgcgtggaattacccggcgggcgtcttgatatcgcctggaaaggtccgggccaaccgctgtatatgactggcccggcggcacatgtctatgacggatttattcatttatgaaacaagtcggggaagaacagcaggaactcgccagcgagctgaacgatcgcgcagtggtggactatctgttgcaacatcctgaattctttattcgtaatgcggcgctggtggagcatatgtcggtgccgcatccggtacgtggttcggtctcgctggtggaatggcacatggcgcgggcgcggaaccatatcaacgtgctggaagagaatatgacgctgctgatggcccaggcgacggctaacgaaagcctgtttcagcgcctgtttgatctccagacgcggctggcggcggccgatagccttgatgaaatgctgaaccgctttcatcgctgggcgcgcgagttgggcctggcgggcgccacggtgcgcctgtttcccgacagctggcggctcggcgcgccctccaaattcactcatctggcgataagccgtcaggcgtttgagccgattcgcattcagcgtcttgggcaacagcgccattatcttggcccattaaacggcccggaactgctggtggtgctgccggaagcaaaagccgtgggttcggtagcgatgtcgctgctggggggagataaagcgcccggcgtgatgctgttcagcagtcgcgaccctcagcactatcagcaaggtcagggaacgcagcttttgcatgaaattgcgtcgatgctcccggggttgctggagcgctggatcgagcgcgcatgaccgactcgccgctgtttacgcccgtagaacgctttttacgctatcttggcgtggagcgtcagctgagcccgataacgctgctgaactaccgccgccagcttgagacgcttatcgcgctggcggatagcgccgggctgaaaagctggcagcagtgcgatgctgcccaggtccgtagcctggcggtgcgcagccgtcgccaggggctggggccagccagcctggctttacgtctctccgccttacgcagcttctttgactggctggtgagccagggcgaactggccgcgaatccggcgaaggggatttcggcgccgaaaacaccgcgccatttaccgaaaaatatcgacgtcgacgacgttaaccgactgctggatatcgatcttaacgatccgctggcggtacgcgaccgggcgatgctggaagtgatgtacggcgcgggactgcgtctctcggagctggtgaatctcgacattaagcacctcgatctggaatccggcgaggtgtgggtgatgggcaaaggcagcaaagagcgccgcctgccgattggccgcaacgcggtggtgtggattgagcactggctcgacctgcgcggcctgttcggcgctgatgaagacgccctgttcttatcaaagctgggtaagcgaatttccgcgcgtaacgtgcaaaagcgctttgccgaatggggcattaagcagggcctcaacagccacgtgcatccgcataagctgcgccactctttcgcgacccatatgctggagtcgagcggcgatctgcgcggggtgcaggagctgctgggtcatgcgaatctgtccaccactcaaatttatacccatcttgattttcaacaccttgcgtcggtgtacgatgcggcgcatccgcgcgccaaacgggggaaataatgcgtttttaccgacctctgggccagatttcagcactgacatttgacctggacgataccctttatgacaaccgtccggtgattgaccgaacgctgcatgagtcgctgagctttgtgcgcagctaccacccgtcgctgagtcaatttgacgccagcgaactcaaccggctgcgccagacgctgctggcgtcagagccggaaatttaccacgatgtcaccgagtggcgccgccgcgcgctggagctggggatgatcaacgccgggctttctgcggcgctggcgaaaacgggggccgaggaagcgatggcgaacttcgcccactggcgcagcctgatcgatgtcccgcaggagacgcacgatacgctggcgcagctggcggaaaagtggccgctggtggccattaccaatggtaatgcccagccggagctttttggcctgagcgactacttccgcttcgtgctgcgcgccggtccggacgggcgctctaagccttttgccgatatgtatcatctcgcagccgagcggctggcgctgccgctggggcagattctgcacgtcggggacgatctgacgaccgacgtggcgggctccattcgctgcggcatgcaggcctgttggatcaaaccgcagggcgcagacctgatgcgcaccgccgacagccgcctgttaccgcacatcgaaatttcacggttggcatctctgacctcgctgatataatcgtcagtagttctgtataaattaacagtagcctggtggactgaacgttgccgggcgtctcatttccggcggtgccaatggacgtttcttacctgctcgacagccttaatgacaaacagcgtgaagccgttgcggcatcacgtactaacatgctggttctggcaggcgcgggcagcggtaagacgcgcgtactggtacaccgcatcgcctggctgctgagcgttgagcactgttccccttactccattatggcggtgacctttaccaacaaagcggcggcggaaatgcgccatcgtattggccaactgatgggtaccacccagggcggtatgtgggtcggcactttccacgggctggcgcaccggctgctgcgcgctcatcaccttgacgccaacctgccgcaggacttccagatcctcgacagcgaagaccagctgcgcctgctcaagcgtctgattaaggcgatgaatctcgatgagaagcagtggccgccgcgtcaggcgatgtggtacatcaacggccagaaagatgaagggctgcgcccgcaccatatacagagctacggtaacccggttgagcagacctggcagaaagtttatcaggcctaccaggaggcctgcgatcgggcggggctggtggatttcgccgaactgctgctgcgcgcccacgaactgtggctcaacaagccgcacattcttcagcactaccgcgagcgctttaccaatatcctggtggacgaatttcaggataccaacaacattcagtacgcgtggatccgcctgctggcgggcgataccggcaaggtgatgatcgtcggcgatgacgatcagtccatttacggctggcgcggcgcgcaggtggagaacatccagcgcttcctcaacgatttccccggcgcggaaactatccgcctcgagcaaaactatcgctcgaccagcaatatcctcagcgcggccaacgccctgattgaaaacaacagcgggcgcctggggaaaaagctgtggaccgacggcgccgacggcgagccgatttcgctctactgcgcgtttaacgatcttgatgaggcgcgctttgtcgtcaaccgcatcaaaacctggcaggaaaacggcggggcgctggagcagtgcgcgattctgtatcgcagcaacgcccagtcgcgcgtgctggaagaggcgctgctgcaggccagcatgccgtatcgtatttatggcggcatgcgcttcttcgaacgccaggagatcaaagatgcgctctcctatctgcgtctgatcgccaatcgtaatgacgacgcggcctttgagcgcgtggtgaataccccgacgcgcggtatcggcgatcgcacgctggacgtggtgcgccagacctcgcgcgaccgtcagctgacgctgtggcaggcctgtcgcgagctgttaaaagataaagtgcttgccggacgcgccgccagcgccctgcagcgttttatggagctcattgacgccctggcgcaggaaaccgccgatatgccgctgcacgtgcagaccgatcgggtgattaaagactccggcctgcgcatgatgtacgagcaggagaaaggcgagaaaggccagacgcgcattgaaaacttagaggagctggtgacggcaacgcgccagttcagctacaacgaagaagatgaagatttgatgccgctgcaggcgttcctctcgcatgcggcgctggaagcgggagaagggcaggcggatacctggcaggatgcggtacagctgatgaccctgcactcggcgaaagggctggagttcccgcaggtctttatcgtcggcgtggaagaggggatgttcccgagccagatggcgcttgatgagggcggccgcctggaagaagaacgccgtctggcctacgtcggcgtcacccgcgcgatgcagaagctcacgctgacctatgcggaaacccgccgcctgtatggcaaagaggtttatcaccgtccgtcgcgctttatcggcgagctgccggagtcgtgcgtggaagaggtgcggctgcgcgccacggtgagccgtccggtcagccatcagcggatggggacgccgatggcggaaaacgacaccggctataagctgggccagcgcgtgcgccatgccaagtttggcgaaggcacgatcgtgaacctcgaaggcagcggcgaacacagccgcctgcaggttgcgtttcaggggcaggggattaaatggctggtcgcggcgtatgcccggcttgaaacagtgtaacagtaagaaaagtatcattattttgtaatattctgctacctttatacgttaaggagcttgatttgctctttagcgttccgttgcgtgttgacgccgtttttgcgctggcgtaacatgcgcgcacgattacgctaagaggacattcgccttggacacacccagtagatgctggctcaatttcctgcccatcaggaacaactcctaaggctatcctcttatgctgatagccttagcggttgtcggcgacccgttctattcccgtcgctctgagtcaggcttaatggtctgaaacccaaattgtttctgtgtgcccaccgaactgtccgataattttttgcattgggagtcccggtcatgctgagcgcatttcaactggaaaacaatcgtttaacgcgtctggaagccgacgagatcaagcacctcgccagttcggtgtgggtcgatctggtcgagcctgacgacgatgaacgaagccgcgtgcaaacggaattgggccagaacctggcgacgcgcccggagctggaagacatcgaagcgtcagcgcgtttctttgaggatgaagacggcctgcatatccactcatttttcttttttgaagatgctgaggatcacgccggtaactctaccgtagcgtttactatccgcgaagggcgtctgttcaccctgcgcgaacgggagctgcccgctttccgcctgtatcgcatgcgcgcccgcagccagtcgatggtggacggcaacgcttacgagctgctgctggacctgttcgaaaccaaaatcgagcagctggcggatgaaattgaaaacatctatagcgacctggaaaagctcagccgggtgatcatggaaggtcgtcagggcgatgattacgacgaggcgctctcgacgctggcggagcaggaagatatcggctggaaagtccgcctgtgtctgatggatacccagcgcgcgctgaacttcctcgtgcgcaaagcccgccttccggccggtcagctggagcaggcgcgtgagatcctgcgcgacatcgaatccctgctgccgcacaacgaatcgctgttccagaaggttaacttcctgatgcaggcggcgatgggttttatcaacatcgagcagaaccgcatcatcaagatcttctcggtggtctccgtggtgttcctgccgccgacgctggtggcttccagctatggcatgaactttgagtttatgcctgaactgcactggagctttggctatcccggcgcgattgtctttatgatgctcgccggcctggcgccgtatctgtactttaagcgtaaaaactggctgtaaaaaaaggagcttcggctccttttttgcgtaccagcttggctttatgccctacgcgtacggcgtattgtgtaaaccgcatccatcacgaaaatcgccagcgccacccagataaaggcgaaggttaccattttatccgcgcccggcacttcgccgtagaaggttaccgccagcaggaacatcagcgtcgggccgatatactggaaaaatcccagcgtggagaggcgcagacgcgtcgccgcgccggtaaagcacagcagcgggatggtggtgaccacgcccgccgccatcagcagcaggttcagcgaccacggattctgccccatgtggctggtcgggctatcggcaataccaaacagataaatcgcagcgaccggcagcagccagagcgtctcaaacagcatcccggtttgcgcatccacggcgatctttttacgcagcaggccgtaaaaagcgaagctgaacgccaggcccagcgcgataatcggcagcgagccgaaggtccagagctgtaccagcacgccgcaggcggccagcagcaccgccagccactgcatccggcgaaagcgctccccgaggaagatcatccccagcagaatattcaccagcggattgataaaatagcccaggctggcttccagcatatgatggttattcaccgcccagataaacagcagccagttgccgcccaccagcaccgcagagagcgccagcaggaacacctttttcggcgttttcagcagccttttgacctgcggccactgacggctgatgctgatcagcgcgaccatgaaaaagaaggaccagatcacgcggtgagtcagaatttcatcggcgggaacatagtagataagcttgaagtacgccggcgcgataccccagataaaataggcggccagggccagaagaatccccacccgcgtttgtttagcgtccatcggtacaaatccattgccaaagagagagatgttactcgatttaggccgatcaacccaccatatacgtcgccgtggcgctggcgatatacacctgctcttcgttatgcagctcgacgcgggccaccgccactttattaccggcgcgcagcaggctgctggtagcggtaaagcgttccccgcggcccggacgcaggtagtcgacgcgcagatcgatagtgcccatccgcgacaggcgctggcgcagctcttcttcattgatggtgtcgtggcgagtcagcgtgctgccgacgcataccagccccgcagcgacgtccagcgctgaggcgatcacgccgccatgtaaaatgctctgcgcccagttgcccaccatcatcggctgattgttgaaactcagctgggcaaactccttttcatagcgctccagctccagccctaaggcacgattaaacggcatatggtagacgaagatctctcccaccagcttcagggcggcggcggcggtcagttcagacataacaacacttccataagttaatgaaatgttgattttatgcttctaaaatattgatttctactttaagaacggataacaggtcagatgccgcataaataggtagaatgctgcctgggttaaacagaaataataaatatccatccaggagaacagcaatgcgtatctctttggcctgcctgctggcgcttgttgcgcttccggccggcgttctggcgcaggacgcgccggtgaataaacaggtccacgacgctccggtcgttcgcgggagcattatcgccaacctgttacaggaccatgataatccgttcctgctctatccctacgagagcaactatctgctctatacgtggaccagcgatctcaataaagaagcgattcgtagctacgactgggccgaaaatgcgcgtaaagatgaagtgaagttccagctcagcctggcgtttccgctgtggcgagggatcctcggcgagaattcgctgctgggcgcttcttatacgcaaaaatcctggtggcagctctccaacagcaaagagtccgcgccgtttcgcgaaaccaactatgagccgcagctgttcctcgggtttgcgaccgattactcgttcgccggctggacgctgcgcgacgttgagatgggttataaccacgactctaacggccgttccgatcccacctcccgcagctggaaccgcctctatacccggctgatggcgcaaaacggcaactggctggttgaggtgaagccctggtacgtgattggcagcaccgacgataatccggatatcaccaaatatatggggtattaccggctgaaagtgggctatcagctgggcgacgccatcctcagcgcccaggggcaatataactggaataccggctacggcggcgccgagcttggggtgagctatccgatcaccaaacacgtgcgcgtctatactcaggtctatagcggttatggcgagtcgctcatcgattacaacttcaatcagacccgcgtcggcgtagggctgatgctcaacgatctgttttaatcgttgcactctggctctcaggcgctgaaaatagcgcctgttttcttttcaggcatatggggtcaacgtggcgcaggcggaagtattgaatcaggaatcgctggctaagcaggttttacaagagaccttcggctaccagcagtttcgcccgggccaggaaaccattatcgatacggcgttggccgggcgcgattgcctggtggtgatgccaaccggcggcggcaagtcgctgtgttatcaggttccggcgctggtgctgggcggtctcaccgtcgtggtgtcgccgcttatttccttgatgaaggaccaggtcgatcagctgctggctaacggcgtggcggcggcgtgtctgaattcaacccagagccgggagcagcagcaggaggtgatggctggctgccgcagcgggcagattcgcctgctgtatatcgccccggagcgcctgatgctggataacttccttgagcatcttacgcactggaatctgtcgatggtggcggtggacgaggcgcactgtatttcccagtgggggcacgatttccgtccggaatacgccgcgttagggcagctgcgccagcggataccgcaaatcccgtttatggcgctgaccgccaccgccgatgacacgacgcgtcgcgacattgttcgcctgctggatctaaacgacccgctcattcaggtcagcagcttcgaccgacccaacatccgctatatgctgatggagaagtttaagccgctggatcagctgatgcgctacgtgcaggaccagcgcggtaagtcgggtattatctactgcaatagccgctcaaaagtggaagacaccgccgctcgcctgcaaagccgcggcatcagcgccgcggcctatcacgccgggctggaaaaccatatccgcgccgacgtgcaggagaaattccagcgcgacgacctgcaaatcgtggtggcgacggtagccttcggtatgggtatcaacaaaccgaacgtccgttttgtggtgcatttcgatatcccccgcaatattgaatcctattaccaggagaccggccgcgccgggcgcgatgggctgcctgccgaggcgatgctgttttacgatccggcggatatggcgtggctccgacgctgccttgaggagaaacccgccgggccgctgcaggacattgaacgccataagctcaacgcgatgggggcctttgccgaagcgcaaacctgccgccgtctggtgctgctcaactactttggcgaggggcgccaggagccctgcggcaactgcgatatctgcctcgatccgccgaaacagtacgacggtttaatggacgcgcgtaaggcgctgtcgacgatttaccgcgtcaatcagcgctttggtatgggctacgtggtggaagtgctgcgcggcgccaataaccagcgtattcgcgatatggggcacgacaagctgccggtctacggcattgggcgcgaacagagccacgagcattgggtcagcgtgatccgtcagcttattcatttaggcctggttacgcagaatatagcccagcactctgcgctacagcttaccgaggccgcgcgtccggtcctgcgcggcgacgtgacgctacagcttgccgtgccgcgtattgtggcgctgaagccgaaagcgatgcagaaatcctttggcggtaattacgatcgcaagctgttcgccaagctgcgcaaactgcgtaaggcgattgccgacgaagagaatatcccgccctacgtggtgtttaacgatgcgacgctaattgaaatggccgagcaaacgccgctgacggccggggagatgctcagcgtcaacggcgttggcacgcgtaagctcgagcgttttggtaaagagtttatggccctgatccgcgcgcacgtggatggcgatgatgagtagtcagccagacgaaaaagtgtaaatatagttttcgtcctgactatttccctgcgagttaattatgttgacgctttttttcaccgtggcgctggtgcatatcattgcgctgatgagtcctggcccggacttcttctttgtttcacaaaccgccgttagccgctcccgcaaagaggcgatgatgggcgtgctggggatcacctgcggagtaatggtatgggcgggcgtagcgctgctcggcctgaacctgattatcgagaagatggcctggctgcataccattattatggtcggcggcggtctgtatctgtgctggatgggcttccagatgctgcgcggcgcgctgaaaaaaagcgaagcggcagcggcggtagagcctcaggtcgaactggcgcgcagcggccggagcttcctgaaagggctgctgaccaatctggctaacccaaaagcgattatctattttggctccgtgttctcgctgtttgtcggcgacagcgtcagttccggcgcgcgctgggggattttcctgctgattgttctggagacgctggcctggtttacggtggtcgccagcctgttcgccctaccgggcatgcgccgcggctatcagcggatggcgaagtggatcgacggcattgccggtactctgtttgccgggtttggtattcacctgattatttcgcgctaagcgttctgcggcccgcccaagggttatgggcgggccggatattaatgacgcagctgctgcaaatcgtcggacgtcagaccggtcatttccataaccgcagtagtatcaatgccccgctcgagcatggcctttgcgacgttaagaagcgcagcgcgtttaccctcttttatgccttccttaatgcccttctgcataccttcctcaagccacttttctgccagagtcatcagtacacctccatgttgcggcacccgctgtgccagctcatataatagcggccgaacatcctgctcttctcccccctgggccatatattttatcagtacggtaatttgctgtttatctatacatcaggcgtggcgcgcagaggccagcagggcgccgaccagcataaacagcgatccaaaaaccttgtttagcgctttcatctgtttcggccccttgatccacgcggcgatgcgctgcgccagcgtggcgtagccaatcatcacgataatatcgaccacgatggtggtgacgccgagcacgaggtactgcatcacctggggctggtgcggcacgataaactgcgggaagagcgcggcgaggaacacgatgctttttgggttggtcaggttgacgaacaccgcgcgcttaaagagtttgccgcggctctgcgcttgcgcaagggtattcagatcgagagaacccgcggctcgccactgctgaatgccgagccagataagataagcggcgcccgcccatttcaggatttcaaaggccaacagcgaacgggaaaaaagcgtacccaggccaacgcccaccagcacgatatgaatgccgagcccggtctgtagcccggcaatagaagccgccgcgccgcgataaccgtggttgattgaggtggtcatggtatttatcgccccggatcccggcgacaggctgagaataagagatgtcagcagataggcaaaccaccactcgaacgtcatgagaaactccctgattgtctgtttttatgccacaatacgctattgtgtaagcattgtgtgatgcacgataaaaaaacgattttcagcggttatcaggggtgtaagcccgatgtttttgcagcaaaaggactgggaaacacgagaaaacgcgtttgcggcctttaccatggggccactgaccgatttctggcgtcagcgggaagaggctgaatttacgggcgtggataacgttccggtgcgctttgttcgcttctgcgccaaaagtcatgaccgggtcgtggttatttgtccgggtcgcattgaaagctacgttaagtacgccgaactggcttacgatcttttccgcagcggttttgacgtgatgattatcgatcatcgcggccaggggcgctccggacgcatgctttcagatacccaccgcgggcacgtcgttaatttcagcgattacgttgacgatctcgccgcgttctggcagcagcaggtggcacccggacgctggcggaaacggtttatactggcccactccatgggcggcgctattgcgacgctatttttgcagcgctaccaccagcattgcgacgcgatggcgctctgtgcgccgatgttcggcatcgttatgcgcctgcctgactggatggtgcgccatattctcgattgggctgagggccatcagcgcattcgtgaagagtatgccctcggtaccggccgctggcgggcgctgccctttgcggttaacgtactgacgcacagccgtcaacgctatcgccgcaacctgcgcttttacgccgatgagccgcagctgcgggtcggcgggccgacgttccactgggtgcgcgaggggatcctcgccggcgaagaggtgctggccggtgcggagaaagacgtcacgccaacattattgctccaggcggaagaagagcgggtggtcgataaccgtatgcacgatcgctactgtgaacttcgcgccgctggcggtcatccctgtgaaggggataagccgtttgtcatagaaggggcataccatgagatcctttttgaaaaggacgcaatgcgctcggtcgcgctaaacgctatcgtcgatttttttggtcgacacacttaatccggcgaaacgctcgtcgccctgcttagaggttaaaatttttatgtaccaggttgttgcgtctgatttagatggcacgctgctttctcccgatcactgcttaactccctacgccaaagagacgctgaagctgcttaccgcacgcggtatcaacttcgtgttcgcgaccggccgccactacatcgatgttgggcaaattcgcgataatctcggcattaaatcctatatgatcacctcgaacggcgctcgcgtgcacgatagcgaagggaagcagatcttcgcccacaaccttgaccgcgatatcgccgccgacctgttcgaaatgatgcgtaacgatccggcgattgtgaccaacgtctatcgtgaagatgagtggtatatgaatcgccatcgtccggaagagatgcgcttcttcaaagaggcggtgtttaactacaagctgtacgagccgggcgagctggatcctgaagggatcagcaaagtctttttcacctgcgataatcatgagcatctgctgccgctggagcaggcgatcaacgcccgctggggcgatcgggtgaacgtgagcttctctaccgttacctgcctcgaagtgatggcgggcggcgtgtcgaaagggcatgcgctggaggccgtggcgaaaatgctcggctatagcctgaaagagtgtatcgccttcggcgacggtatgaacgatgcggaaatgctgtcaatggcgggcaagggctgcattatggccaacgcgcaccagcggctgaaagacctgcatcctgagctggaagtgatcggcagcaacgtcgatgacgccgttccccactacctgcgtaaactctatcttgactaaaaaagattgacgattgtttaattaataagcagtcgtcaacctgtcacttcgctacaatgcgtgttctttactctatgagacattcattgtggcgctactgattatcaccaccattctgtgggccttttcctttagcctgtatggcgaatacctggcaggccacgtcgacagctattttgcggtgctggcgcgcgttggcctggcggcgctggtgtttttgcccttcctgcgcacccgcgggcagagcctgtcaaccatcggcctgtatatgctggtgggggcgatgcagctcggcattatgtatatgctgagtttccaggcctatctgtacctgacggtatcggagcttctgctgtttaccgtcctgacgccgctctatatcacgctgatttacgatgtgatgagccgccgtcgcctgcgctggggctacgcctgtagcgcgctgctggcggtaatcggcgcgggcatcatccgttatgaccaggtgaccaaccatttctggaccggtttgatcctggttcaactctccaacatcagcttcgcgattggcatggtgggatataagcgcctgatggaaacgcgtccgatgccgcagcataacgccttcgcctggttctacatcggggcgtttctggtggcggcggttgcctggtcgatgctgggtaacgcgcagaaaatgccgcaaacttcgctacagtggggcatcctggcctttcttggcgtggcggcatccgggattggttactttatgtggaactacggcgccacccaggtggatgccggtacgctcggcatcatgaacaatatgcacgtgcctgccgggctgctggtgaacctggccatctggcagacgcagccccgctggccgagctttattattggcgctctggtgatcctggcctcgctatgggtccatcgacgttgggtcgctccgcactccgcacaaacggtaaatgatcgcaagcgtggttccgcgctgagcgaataaacgcctcggtaaccggctggcgctgctcgccgtcgcgcaccgcggcgtacagtcggctccacagtccctcgcccagggttttggtcaccaccaggccctggcgctcaaagctttccacgacccagtgcggcagggcggcgatgcccattcgcgccgccaccatctgaattaacaacagcgtattgtcgacgctcttcagctgcgggctaatcccggcaggctgcaggaagtgacgccagatatccagacgtgcgcgctggaccggataaatcagcagcatttcggtcgctaaatcctcgggcgcgatgcgcgcctttgtcgccagcggatgatccggcgccatcaccaggcgtacttcgaaatcaaacattggcgaatagtgcagtccgctgcgcggcaggatatcggaggtcatcaccagatccagctcgccctgctgcaggcccggctgtgggtcgaagatcaccccggactgaaagtccacctccacatgcggccagcgggcgcggaaactctccagcgccggcgtgagccactgaatacagctatggcattcgatggcgatacgcagccgggtttgctgcggctcattgcaatcctgcagggcgcggctgatttgcggcaggacctgattggccagctgcagcaggatctctccctgcggagtaaagcgcagcggctgacttttacgtacaaacagacggaagccgaggcgctgttccagatcgctgaactggtgggacaaggcggattgggtctggtgcagggccgccgccgcgcctgccagagagccgctattccgcaacgcctgtagcgttttcaggtgtttaatttcgatcatgaaagtccttcacttcggcatgaataatttgcgcttgaggaatatacagtaactgccaattatggatgtgtaaacatctggacgtctaaatcctttatctttcgaatttatggcagcgttggctgcacttcctcaccccagtcacttacttcagtaagctcctggggatgagcaagtttgccgccttccctaaatccgaaatctttcggattgcaattatgaggctcaaaaaatgacaattattaaccacaccctcggtttccctcgcgttggcctgcgccgcgagctgaagaaagcgcaagaaagctactgggcgggcaataccagccgcgaagaactgctggccgttggccgcgaactgcgcgctcgccactgggaacagcagaagcaggcgggcattgacctgctaccggtgggcgatttcgcctggtacgaccatgttctgaccaccagcctgtggcttggcaacgtgccggctcgtcatcagaacaaagacggctccgttgatattgataccctttttcgcataggccgcggccgcgcgccgaccggcgaaccggccgcggcggcggaaatgaccaaatggtttaacactaactaccactacatggtgccggaatttgtgaagggccaacggttcaaactgagctggacccagctgctggatgaggtggacgaagcgctggcgctgggccacaaggtgaagcctgttctgctggggccggtcacctacctgtggctcggtaaggtgaaaggcgagccgttcaaccgcctgagcctgctgaacgatattctgccggtttaccagcaggtgctgactgaactggcaaaacgcggcgttgagtgggtgcagattgatgaaccggcgctggtgctcgagctgccgcaggcgtggctggacgccttcaaaccggcttacgcggcccttagcggtcagcttaagctgctgctgactacctactttgaaggcattaccgataacctcgacaccatcaccgcactgccggtacagggcctgcatgtggatctggtccacggccaggacgatgtcgccgaactgcataagcgcctgcctgccgactggctgctctccgcggggctgatcaacggccgcaacgtctggcgcgccgatctgagcgagaaatacgcgcaggttaaagatatcgtcggcaaacgtgaactgtgggtagcctcttcctgctccctgctgcacagcccgatcgatctgaacgtggaaacgcggctcgatgccgaagtgaagagctggtttgccttcgccctgcaaaaatgccgggagctggcgctgctgcgcgatgcgctgaacagcggcgacaccgcggcgattgctgactggagcgcgccgatccaggcacgtcgccagtcaacccgcgtgcacaacgctgcggtagagaagcgtctggcggccattaccgctcaggacagccagcgtcaaagcgtctacgaagttcgcgccgaagcgcagcgcgcccgctttaagctgccggcctggccaaccaccaccatcggctccttcccccagaccaccgagatccgcggcctgcgtctggacttcaaaaagggcaatctcgatgctaaccgctaccgcaccggcatcgccgaacacattaagcaggcgatcgttgagcaggagcgactggggctggacgtgctggtacacggtgaagccgagcgtaacgatatggtggaatacttcggcgaacacctggacggctttattttcacgcagaacggctgggtacagagctacggctcccgctgcgtcaaaccgccggtggtcgtcggagatatcagccgcccggaggcgatcaccgtcgagtgggcaaaatacgctcagtccctgaccgacaaaccggtaaaaggcatgctgaccggcccggtgaccattctttgctggtccttcccgcgtgaggacgtcagccgtgaaacgattgcgaaacagatagccctcgcgctgcgcgatgaagtggcggatctggaagccgccggtatcggtatcatccagatcgacgaaccggccctgcgggaaggcctgccgctgaagcgtagcgactgggatgcgtatctggcatggggggtggaagctttccgtatcaatgctgcggtggcgaaagacgacacgcagatccacacccatatgtgctattgcgagttcaacgacatcatggattccatcgccgcgctggatgcggacgtgattaccatcgaaacctcgcgctctgatatggagctgctggagtcgttcgaagcgttcgactacccgaatgaaatcgggccgggcgtgtacgacattcactccccgaacgtgccgagcgtggagtggattgaagcgctgctggaaaaagccgcgcagcgtatcccggcagagcgcctgtgggtgaacccggactgcggcctgaaaacccgcggctggacggaaacgcgcgccgcgctggccaacatggtcaaggccgcgcaaaacctgcgccaggcgtaatataaatcacacttgtgggaggccccggcctccttttttggtttcttctcttcgctggcaaaaccgaatgtgaagaactgttcggcgtgaggcggcagcgtctggacaacgtccacccgctcccggctgttgctcaggacggatgtctttgactacagttaagcgttccctgaaccgaagctgtgataactctcctgaggtgaaagatgattgaacaccacgatcaaaaagggtatttgcgttttgccattaatctgggtaatccggtgcttacgacactgctgccggatggctctccggggggggattaccgtcgagctggcaaagaaactggctgcagagagccagcgcgaagcgcggtttgtgacctggccgacggccgggcaggtagttgacgcggcgctgcaggatcaatgggatatcgcctttctggctatcgacccggcgcgggaagataagcttcgctttacgccatcctacgtcactatcgaaagctcgctgatggtgaaaaaagagagccagattcaatcggttcaggagatggaccgcgcaggcgtggtgattaacgtgggcaaaggcgcggcctacgagctgtatctgattcgcacgctgcagcatgcaacgatgcgccagtacgccacctcacaggaggctattcaggcatttatcaacggcgaaggcgattgggtggccggtattcgccagcctctggagaaagccgcgcaggagaatccgcagtttcgcgttctgcccgacagctttagccagatacaccaggcgatatgcgtaccgcgcaatgcgacgcagcactatgaatttatttgccgccgcctctcttcctggatagcggacggtactattgccgggatggtgagccgccatatcggcaatagctgatcgttaaccgcgcttaccgccatactgcgcaaaccaggccagcatccgctgccagccgtcttttgccgactcttcatgatagctggcgcgatagtcggcattaaaagcgtggtcggcgtgcgggtaaaccacgatttccgccgtggcgttggccgcccgcagcgcctgacgcatcgtttccaccgtgtcctgcgggatgctgtcatctttcgcgccataaagccctaacaccggcgcgttaagatcgacggcaatatcgaccggatgcttcggcgaattcagcgttttctcgcctaccagcttgccgtaccaggcgacggcggcttttaactgcggattatgcgcagcgtacagccaggtaatacgcccgccccagcagaagccggtaatcagcaagcgatgagcatcgccgccgtggcggtaggcccagctggccacgtgatcgaggtcggccagcacctgagaatccggcacctttttgaccagtccctggaacagagaagggatgtcgctgtaatcattaggatcgccctggcggaaatagagctccggtgcgatagccagatacccctcctttgccagacggcggcagatatcgcggatatgttcatgcacgccgaaaatttcctggaccacgataacgaccggcagcggaccgtcgacgccgcgcgggcgagcatggaacgccggcatgttatctccctgtgaagggatggatgtctccccggagacgatgttctcatctgatgtgtgaacggcagttgaggcgtgcggcgtggctgcaggtgcaaagccggtttgcttaattgtcgtcatggtattctccgtaccctcaatttattagcgcatcaataactatagctgctctggacaggacgttaatcaaacacagtgcccgaaacaggctatcttttgttcaggcttctgcgatttagcttgttaatgtgatgtatatcactcttttatggaaagttattgcaatgaatttcattcatggtgattgtggtcacaaaattgagccgacagcttctgtaaagtaccgttttgcttctgctgataattcgacccacagaggagttttttatgtccaagtctgatgtttttcatctcggcctcaccaaaaacgatttacaaggggctacgctggctatcgtccctggcgatccggagcgtgtggaaaagatcgccgcgctgatggataagccggttaagctggcatctcaccgtgaattcaccacctggcgcgctgagctggatggtaaagcagtgattgtctgctctaccggtatcggcggcccatcgacctctatcgccgtggaagagctggcccaactgggcatccgtaccttcctgcgcatcggtaccaccggcgccattcagccgcatattaatgtcggcgacgttctggtgacgaccgcgtccgtccgtctggacggcgcaagcctgcactttgcgccaatggagttcccggcggtggctgactttgaatgtactaccgcgctggttgaagcggcgaagtctatcggcgcgaccacccatatcggtgtcaccgcctcttccgacaccttctatccgggccaggaacgttacgataccttctccggccgcgttgttagccgttttaaaggctcgatggaagagtggcaggcgatgggcgtgatgaactatgaaatggaatccgccacgctgctgacgatgtgcgccagccagggcttgcgcgccgggatggttgccggagttatcgtcaaccgtacccagcaggaaattccgaacgcggaaaccatgaagcaaaccgaaagccacgcggtgaaaattgtcgtggaagcggcgcgccgcctgctgtagttaccctttcttctgccaggggtcggactctccggcccttcttttttgcgtagcgcctcgcaggaaaaccctttcaaactggacgtttgtacagcacaattctattttgtgccgtaagtcgttgccgcagggggctttgtggatatctcaattattattagcgccgttgtggcgctggccgtcgggctgattgtcggctggctggcgaccaaagcgcacgccgatcaaattcgcgccgatcttatcgatgagcggcgcgagctggatattgagctgagcgcggcccgccaatgtctggtgcaggagtcacactggcgagaagagtgtgaactgctcaataacgaactgcgcagcctgcgcgatatcaacgcctcgctggaagccgatcttcgcgaagtgaccacccgacttgaatccactcagctgcatgcggaagacaaaattcgccagatggttaacagcgagcagcgtcttagcgaacagtttgagaatctggcaaatcgcatttttgagcacagcaaccggcgggtggatgagcagaatcgccagagcctgcacggcctgctgacgccgcttcgcgaacagctggatggctttcgtcggcaggtgcaggatagctttggccaggaagcgcgggagcgccatactctggcccatgaaatccgcaatcttcagcagctgaatgcgcaaatggcccaggaggcgctaaacctgacgcgcgcgctcaaaggcgataacaaaacccagggcaactggggcgaggtggtgttgacccgcgtgctggaagcgtccggactgcgggaaggatatgaatatcagacccaggtcagcatcgaaacggacaatcgcgcgcggatgcagcccgatgtgattgtccgtttaccgcaggggaaagacgtggtgatcgatgccaagatgaccctggtggcctatgagcgctatttcaacgccgaagatgattacacccgtgaagcggcgctgcaggagcatatcgcttcggtacgcaaccatatgcgcctgctggggcgtaaagactaccagcagctgccggggctgcgttcgctcgactacgttctgatgtttatcccggtagaacccgccttcctgctggctatcgatcgtcagccggaactcattagcgaagcgctgaagaacaacatcatgctggtgagcccaaccacgctgctggtggcgctgcggactatcgccaatctttggcgctatgagcatcagagccgtaacgcgcagaaaattgccgaaagagcggggcggctgtatgacaagatgcgcctgtttgtcgatgatatgtccgccatcgggcagggcctggataaagctcaggataactaccgccaggcgatgaaaaagctcgcctccggacgaggtaacctgctggtacaggcggaatcattccgtgagctgggcgtggaggttaagcgtgagattaatcctgagttagttgaacaggcgacggcccaggatgaagaataccgccttgcgcaggggggtaacccgccgggagataacgatattttatccgatcctacggctactgccatgtttgggggcggctcccggccacgttgaagcgtatgggaagtgcgctaaacctgttacactcaacgaacattttcttgataagcaagcaggcattgagatggttgaggattcacaagaaacgacgcattttggctttcagactgtcgccaaagagcagaaagctgacatggtggcgcatgtatttcattctgtggccgcaaaatatgacgtaatgaacgacctgatgtcgttcggtattcatcgtttgtggaagcgtttcaccatcgactgcagcggcgtccgccgcgggcaaaccgtattggatctggctggtggtaccggcgatctgacggcgaaattctctcgcctggtgggtgaaaccggccgcgtgatgctggcggacatcaacgactctatgctgaaaatgggccgcgaaaagctgcgtaacattggtattgtcggcaacgtggaatacgtccaggcaaacgctgaagcgctgccttttgcagacaacacctttgattgcattacgatttctttcggtctgcgtaacgtgaccgacaaagaaaaagcgctccgctcaatgtatcgcgtattaaagccgggcggccgcctgctggtgctggaattctcaaaaccgattattgagccgctcagtaaagcctacgacgcctattccttccatatcctgccgcgcgtgggtgagctggttgctaaagatgccgaaagctatcgttatcttgctgaatctattcgaatgcatcccgatcaggacacgctgaaaggcatgatgcaggacgcagggtttgaaagcgtcgactactacaacctgacggcaggtatcgttgcgctacaccgcggatataagttctgacaggagggacgctatgcctttcaaaccactggttaccgccggtcttgagacggtccttaacaccttcctctggcgcgatcgggcgctgaaacccgcgcgccagcgcctgctggggaaagtgctgcgcatcgagctgcaagagctttccgatcctgtggtgctggtttttagcgaacgtcagctggacgtgctgggcgcgtgggaaggtgaggctgactgcaccgtacgaacccgccttagcgtgcttccgcaattgcgcaatcgccagcagcttaccgcgctgattcgcagcggcgatcttgaggtgcagggcgacctgcaggtggtgcaaaataccgtcacgctgtgcgatctggcagagttcgatccggctgaactgctcgccccgtataccggtgatgtggttgcggaaggctttagtaaagtattccgcggcggcgctcgctttcttctgcatggcgctcaacgccagcagcgctatgtcgcggaagcgattaccgaagagtggcgcctggcgccggggccgctggagctggcctggtttgcagaggaaaccgctgcggtagaacgaaccctggccgcgctggaaaaacggctggacacgctggagggcaaatgacgccaggagaattacggcgcctgtattttatcgtccacacctttttgagctacgggcttgatgagctcattcccaaaatgcgtatcacgctgccgctgcgaatctggcggcggatgctgttctggatgcccaaccgccataaagatcgtcctcttggcgagcgactccgcctcgcattacaggagctggggccggtgtggatcaagtttggccagatgctctcgacccgtcgcgacctgtttccgccgcacattgccgatcagctggccatgctgcaggatcgcgtcgcgccctttgacggtctgcaggccaaaaagcagattgagcaagccatgggcggcctgccggtagaagcctggtttgatgacttctctgttgaaccgctcgcttccgcttctattgcccaggtgcataccgcgcgtctgaaagagaacggcaaagaggtggtcattaaggtgatccgcccggatatcgtgccggttatcaaagcggatatgaagcttatctaccgtcttgcccgctgggtgccgcgtctgttaccggacggccgtcgccttcgcccgcaggaagtggttcgcgaatatgaaaaaacgctgctggatgagctcaacctgctgcgtgaatcggctaacgctatccagcttcgccgcaacttcgacgagagcccaatgctttatgtcccggaagtttattcggactactgtagcgaaggcatgatggtgatggagcggatttacgggatcccggtgtccgacgtcgccgcgctggaagcgcagggaactaacatgaagctgctggccgagcgtggcgtgcaggtcttctttacgcaggttttccgcgacagcttcttccatgccgacatgcatccgggcaatatttttgtcagccgtaatcatccggaagatcctcagtacattggtattgactgcggtatcgtcggttcgctgaacaaagaagataagcgctatctggcggagaacttcattgccttcttcaaccgcgattatcgcaaagttgcggagctgcacgttgattccggctgggttcccgcggataccaacgtcgaagagttcgagtttgctattcgtaccgtctgcgagcctatctttgaaaaaccgctggcggaaatctcgtttggccacgtgttgttgaacctgtttaatacggcgcgacgtttcaatatggaagtgcagccgcagctggttctgctgcagaagacattactttacgtagaaggtgtaggtcgccagctctatcctcagttagacttgtggaaaacggcgaaaccgttccttgaatcgtggatcaaagatcaggtgggcattccggctctggtgcgggcgtttaaagaaaaagcgccgttctggatcgaaagaatgccggaaatacctgagctggtttaccagagcctgcagcaaagcaagcagctgcagaatagcgtcgataccatcgtgcgcgacatccaggtgcggcacgtgcgccagggtcagtcccgctatttgttcggtataggcgcggttttattactgagtggtacgctgctattcattcatcgtcccgagtggggcatgatgccaggctggctgatggccgctggggtcgtaacctggcttatcggctggcgaaagacgaactgacggcggccgcctttatcactgcgcataatgtgtataatgcgtcctaataattcatcatctgtcataggggaatgtgtatgggtggtatcagtatttggcagttactcattgttgtcgtcatcgtggttctgctttttgggacaaaaaagctgagctcgctcggttcagatttaggggcgtcgatcaaaggctttaaaaaggccatgagcgacgaagagaaaccggaaaaatccgcgccggatgcagatttcgcggcgaagacccttgctggtaagccggatgatgcaaagaaagacgagactaaacgccacgacaaagagcaggtgtaattcgtgttcgatatcggttttagtgagctgctgctggtattcgtgattggcctcatcgttctggggccacagcgactaccggtagcggtaaagacggtggtgagctggatccgcacgctgcggtcgcttgcggctaccgtacaaaatgaaattacccaggaattaaaactgcaggagtttcaggaaagccttaaaaaggtggaaaaggccagcctggacaacctgacgcccgagctaaaagcttcaatggatgaactgcgtgaagcggctgaatctatgaagcgatcctactccgcccacgatcctgaaaaagccagcgacgaagccaataccattcacaacccggtcgtaaaagggagtgaagagcagcgcaaggacgtgacgccagcgacggctgaacatcaggccagtgcgccagagcatgcgcctgactccgtgtctgaagaactccccgcttcgcagagtgaaatcccggcagcgaaagtgaaagctgccgtgtcggcttccgattcctcctcccctgtaccgagtgataaacagtaaaaatgggcgtagacgatactcaaccgctaattacgcatctgattgagctgcgcaagcgcttgatcaacagcattcttgcgattctggtgattttcctggcgttagtctatttcgccaacgatatctatcagctggtttccgcgccgctgattcggcagatgccggtcggtgcgaccatgatcgccacggatgtggcctcgcctttcttcacgccgatcaagctgacctttatggtatcgataattttgtcggtcccggtcattttgtatcaggtctgggcctttgtggcgccagcgctgtataagcatgaacgtcggctggttatgccgctgctggtctccagtacgctgctgttctatatcggcatggcctttgcctacttcgtcgttttcccgctggcgtttggttttctgacccacgcggcgccggaaggcgtacaggtctctaccgatattcgcagctacctcgactttgtgatggcgctgtttatcgcctttggcgtctcattcgaggttccggtggccatcgtcctgctgtgctggatgggcgtcaccacgccggacgacctgcgtaagaaacgcccctacgtactggttggcgcattcgttgtcgggatgctgctgaccccgccggacgtgttctcgcaaaccctgctggcgattccgatgtactgtttgtttgaggtcggggtcttcttcgcgcggttctacaccggtaaacgcctgacgcgtgatgaggatgccgctgccgaagaggcgcagggcaaagaagaataacgctcaaccgcccgccagggcggttgccgtatgggagcgatgatgtttgatatcggcgtaaatctgaccagttcgcagttttcccgcgatcgcgacgaggtggtttcccgggcccggggggcgggcgtcagcgggatgctattgacgggaaccaacctgcatgaaagcgcgcaggctcagcagctggcgcgccgttattccgggtgctggtcaacggccggcgttcatccccacgacagtcgcagctggacggactcggcggcggcagcggtctatgcgctggctcgcgagccggaagtcgttgcggtgggtgagtgcgggctggatttcaaccgcaatttttcgacgcctcaggagcaagaagcggcgtttagcgctcagctggcgctggccgcggagctgtcgatgccggtatttctgcactgccgcgatgcgcacgagcgcttcctggccctgctggtgccctggcttgataagctcccgggggccgttgtgcattgttttaccggtagccgcgaagagatgcgcgaatgcgtggagcacggtttatttattggtatcaccggctgggtatgcgatgagcgtcgggggctggagctgcgagagctgctggtcgatattccggcagagcgcctgctgattgagaccgatgcgccgtacctgttgccgcgagatatgctgccaaaacccgcttctcgccgcaatgagcccgcctacctgccgcatattctgacccgcatcgcgcaatggcgtggggaggaggcgcaatggctggaagacgtgactgatgctaacgtcagaagactttttggcgtggctttttaagcgccgtcagattttataaaagtcagtatttttaacgctctggagcacctgcttgttaagcagattcagcagcagcatcgagcgggcttcgccgtccggttcggtaaaaatagcctgcagaccttcaaaggcgccatcggtgatcagcacgctgtcgccttcatgcggcgtttcaggatcggtgatgccttccggtttgtagatggaaagctgatgaatgacggcagatggcacgatagcgggcagcgcgccgaaacgcacaaaactgttcacgccgcgcgtggcgctgatggtagtggtatgaatcacttccgggtcgaactcgataaacagataatttgggaacaggggttcgctgaccgtcgtgcgtttaccgcggacgattttttccagctcgatcgttggcatcaggcaattgacggcctgccgttcaaggtgttcttgggctcgttcaagctgcccacgtttgcaataaagtaagtaccaggcttgcataatgactctttccaatgctactagctgcaagcataacaaaagcccggtacgatcgcgaaatcattgcgggtgaaaactaaatttcagcgttctttcacgctaatttaacaaaaatacagcatagctccggcgaacgccgtataatcacccgcctgtatagaggtcaataacaactccatgaaataccacgatctacgcgaatttctgacattactggagcagcagggggaattgaaacggatctccctgccggtcgatcctcacctggaaatcaccgaaattgccgaccgcactttgcgagctggcggtccggcgctgctattcgaaaatcccaagggctacgccatgccggtgctgtgtaatcttttcggcacgccgcggcgagtcgcgctggggatggggcaggaggatgtcagttctctgcgggaagtgggtaagcttctggcattcctgaaagagccggaacccccaaaaggtttccgcgatctgtttgataagctgccgcagttcaaacaggtgctgaatatgccgactaagcgtctgcgcggagcgccgtgccagcagaaaatcattcagggtgatgaagttgatttgacccgtatcccgatcatgacctgctggccggaagatgccgcgccgctgatcacctggggtctgacggtgacccgcggcccgcataaagagcggcagaatctgggcatttatcgccagcagctgattggcaagaacaagctgattatgcgctggctatcgcatcgcggcggcgcgctggacttccaggagtggtgcgcggcgcgtcctggcgagcgtttcccggtctccgtcgcgctgggcgccgatccggcaaccattctcggggcggtgactccggttccggataccctttccgaatatgcttttgccgggctactgcgcggcaccaaaaccgaagtcgtgaagtgcatctctaacgatcttgaggtgcccgccagcgcggagatcgtactggaagggtatattgaagccggagaaatggcgccggaaggcccctatggcgaccatactggctactacaatgaagtggataacttcccggtctttaccgttacccacattactcagcgtgaagatgccatctatcactcgacctataccgggcgtccgccggatgagccggcggtactgggcgttgcgctgaacgaagtgttcgtccccattctgcaaaagcagtttcctgaaatcgtggatttctatttgccgcctgaaggctgttcctatcgcctggcggtcgtcacgatgaagaagcagtacgccggacacgcgaaacgcgtcatgatgggcgtctggtcgttcctccgccagttcatgtacaccaagttcgttattgtctgcgatgacgatgtcaacgcgcgcgactggaatgatgtgatttgggcgattactacccgtatggacccggcgcgtgatacggtactggtagaaaatacgccaattgattatctggattttgcctcaccggtttccggtttgggttcaaaaatggggctggatgccacaaataaatggcctggagagacccagcgcgagtggggtcgtccgatcaagaaagatcctgaggtgacggcgcgcgtcgacgccatctgggatgaactggctatcttcaaataacagtaagcggggctacgccgctgttttgcacaatagacccgacagaggggacgcatgacaaccttaagctgtaaagtgacctcagtggaggcgattaccgatactgtgtatcgcgttcgattagtgccggaagcggcgttttccttccgtgccggtcagtatctgatggtcgtgatggacgaacgcgataagcgcccattctcgatggcctccacgccgtcggaacaggagtttatcgagctgcatatcggtgcatctgaactgaacctgtatgcgatggcggtgatggatcgaatcctgaaagagcgtcaaatcgaggtcgatatgccgcatggcgaagcctggctgcgcgatgatgaagaacgtcctctgattttaatcgccgggggaacgggcttctcttacgtgcgttcgattctgctcaccgcgctggcgcgcaatccgaatcgcgatatcgccatctactggggcgggcgcgaagcgaaacatctctatgacctggccgagcttgaagcgttaagcctgcagcatccgggcctgcgcgtcgaacccgttgttgagcagcctgacgccgagtggcgtggccgtaccggaaccgtactcacggcggttctgcaggattacggtacgctgggagagcatgatatctatatcgctggccgcttcgagatggcgaaaattgcccgcgacctgttctgcaacgagcgcggcgcgcgcgaagatcgcctgtttggcgatgcctttgcgtttatctgatagccgctctgccagcatccgggcttttggcccggatgctgttgttaccgggcatcgctgaagtaaacgtacagcggtcgttcgttttccagcaaacagagcattttccctaccgggttcccttctttttccagcgtggcggttagctgcgtcgcgatatgctggctgcctatcttctcatcatagcgttcggtagtgatatcggtgacggtcagatccttgaaccgctcgctttgcggatcctgcgccattttaccgatcccccatgagaggcaggcctgagcgttatcctgttcgctggcgagcgctgcggcagggaacgtcgttagcaaaaaaatgatggggattattttcatgactcttcattatccttaatgagcgtgacgtatccggtgataataaccgaatagcggaaataaaaaacccgcccctgacaggcgggaagaacggcaactaaaccttctcccgttatcattcacgctgcctctttgttggctgccctcgctcaccccggtcaccgggttctctatgctcccggggatttgctcggctgccgccgcgatgccgcgcgaatgattcaggggattaacgctttgcttaaacccgctcgaataccgtcgcgataccctgacctaaaccaatacacatcgtcgccaggccgaactgtgcgtctttgcgctccatctgattgatcaatgtggtgctaatgcgcgcgccggaacagccgagcggatgacccagggcgatcgcgccgccgttgaggttgatcttctcgtcgatctgttccatcagccccagatctttaatgcacggcaggatctgcgcggcaaaagcttcgttcatttcgaacacatcgatatcgctggtggagagcccggcttttttcagcgccagttttgacgcgggaaccggaccatagcccattattgacgggtcgcagccaacgacagccatcgaacgcacgcgagcgcggggcttcaggcccagctcgcgggcgcggctttcgctcattaacagcatggctgcggcgccatcggagagggcggatgaggttcccgccgtcacggttccggttaccggatcgaaagcgggtctaagcgcggccagcgcttcaaccgttgtctccgggcgaatcacttcgtcatagctgtaagacttcagcacgccgtcggcgtcgtgaccgcctgtcgggacaatttccgctttgaatgcgccggattgcgtcgcggcccaggcgcgggcgtgggagcgagccgcaaactggtcctgcatctcgcggctgatgccgtgcaggcgcgccagcatttctgccgtcagccccatcattccggcggctttggcgacgttacggctcaggcccggatggaaatctacgccgtggctcatcgggacgtggcccatatgctctacgccgccaatcaggcatacgctggcgtcgccggtcatgatcatgcgtgccgcgtcgtgaagcgcctgcatggaagaaccgcacagccgattgaccgtggtggcgggtaccgaatgcgggatttccgccagcagcgccgcgttgcgggcaatattgaagccctgttccagcgtctgctgaacgcagccccagtaaatatcgtcaatcgtgctggcttcaagggatgggttgcgtgaaagcaggctacgcatcaggtgcgcggagagatcttccgcgcgcacgtggcgaaaggcgccacccttcgaacggcccatcggggtacgaactgcatcgacaatgacaacctgttccattgtgactccttaagcctttttcaggtcgcctggcgcacgggcaggctcaactggtggatagtacggttcgttatgacgcgctttgctgcgcaatccttccggcacgtcgtatagcgggccgagatgctgatactgctgggccatatcgagatattttgcgctaccgagcgtatccagccagcggaacgcgccgccgtggaacggagggaagcccaggccataaaccagcgccatatcggcttctgccgggctggcgataatgccctcttcgagacagcgcaccacttcattaaccatggggatcatcatccgggcgataatctcttcatcgctgaaatcacgcttcggctggctaacttccgccagcaggctatcgactgcggcatcctcttccttcttcggtttacctttactgtcttctttgtagcgccagaagccgaggccatttttctggccgaaacggttagcgtcgaacagcgcatcgatcgcatcgcgataatctttctgcatccgctgcgggaagcccgccgccatgaccgcctgcgcgtgatgcgcggtatcaatgccaacgacgtccagcagataggccgggcccatcggccagccaaactgcttctccatcactttatcgactttgcggaagtccgcgccgtcgcgcagcagctggctgaaaccggcgaagtaggggaacagcacgcggttaacaaagaaaccggggcagtcgttgaccacaatcggcgttttgcccattttgctggcccaggcgaccattttcgcaatggtttcgtccgagcttttttcgccgcgaacgatctcgaccagcggcatccggtgcaccgggttaaagaagtgcataccacagaagttttccgggcgcttcagtacgctggccaactcgctgatgggaatggtggaggtattcgaagccagcacggtatccgggcggactttgtcttccgtttccgccagcaccgcttttttcactttcggattctcaacaacggcttcgaccacgacgtccacgcgttcaaagccggcgtaatccagggttggctgaatagtagaaatgacgccagccatcttgagaccgtcgattttgccgcgctcaagctgtttattcagcagcttggccgcttcggtcatgcccagcgtcagcgatttgtcgttgatatctttcatgaccaccggcacgcctttccaggctgactggtatgcaatgccgccgcccataatccccgcgcccagcacggccgcgtgttttggcgtgtcgatatctttcgtcagcttcttcgcttttgctttgacgtactgatcgttaaggaagatacctaccagcgcacgcgcctcgttggtatgcgccagcgggacgaaacttttattttccagatccagcgcttcttcgcggccaaagcgggcggcggcttcgatggttttaacggcggtaatcggggccgggtagtgcttcccggcggtttgcgccaccatgcctttggcgatggtaaaactcatcgcggcttcaattttactcagatgcagcggctccagcttcggctggcgcttcgccttccagtccaggtcgcctttaatagcctgacgcagaatcgcgaccgcgccatcgatcagtttttcatgcttaaccacgccatcgacgaggccgatttttaaggcctgttcggcgccaacgtctttgccggcggcaatgatttccagcgcgctgtccgcgccaagcatccgcggcatccgcaccgagccgccaaagcccggcatgatgcccagcttcgtttccggcagaccaatgcgcagatccggcgtcgccaggcgataatcggtcgccagcacgcattcgcagccgccgcccaacgcatagccgttgacggcggaaatggtcggaaccggcaaatcttccaggcgattaaagacgctattagcgaaatgcagccactggctgagctgttcttcgggaaccaggaacagagaaagaaattcggtgatatccgcgccgacaataaaagcggctttctcggagcgtagcagcagcccttgcagatctttttgtttttcgagtacgtccagcgcttcaccgaggctggctacggttgcggtatcgagcttgttgaccgagccgggggcatcaaataccagttcggcaatgccgtcttcccgccagtcgaggtacagggtgtcgcctttgtagagcatgtcagtctcctgaatccagcaatatgatctggtcgtaccagatgagacggagtgtggattttatgttaagaaattgcaaataagactttaaataaatgctggtcggatcacacccggcagagatcaccccgtttgaggtcattgtgctaagatgcgaagcatcacgatctcataaaatcaaaggataaatgatggaatcccttgccggtctctataaaaatcatatcgttaccttacaagaacgcacccgcgatgttctggcccgctttaagctggatgccctgctgatccactccggtgaactggtcaacgtcttccttgacgatcatccgtatccgttcaaggtcaatccccagttcaaagcctgggtgccggttacgcaggtccctaactgctggctgctggtggacggcgtcaataaacccaaactgtggttctatctgccggtcgactactggcataacgtggaaccgctgccgacctcattctggaccgaagaggtggatgtgattgccctgccgaaagcggatggtatcggcagccagctgcccgccgcgcgcggcaatattgcctatatcgggccggtgccggaacgtgcgttggggttagatatcgcggcggataaaatcaacccgaaaggggcgatcgattatctgcactactatcgctcttataaaactgactatgagctggcctgcatgcgcgaagcgcagaagtcggcggttaacggtcatcaggccgctcatgaagcgttcctttccgggatgagcgagtttgatatcaaccaggcctatctgaccgcgaccggccatcgcgacaccgatgtaccgtacagcaacattgtggctctgaacgaacatgcctccgtgctgcattacacgaagctggatcatcgcgcgccggcggaattgcgcagcttcctgctggatgcgggcgcggaatataacggctatgcggcggatctgacgcgtacctgggcggcgcatggcgatagtgactatgctcaactgattaaagacgttaatgaggaacagctggcgctgattagcaccatgaaggcgggcgtgagctacgtggattatcatgtccagttccatcagcgtattgccaaactgctgcgcaaacatcagatagtcaaagatatgagcgaagaagcaatggtggaaaacgacctgaccggaccgtttatgccgcacggcattggtcatcctttaggtctgcaggttcatgatgtcgcgggttttatgcaggatgattcgggtacccatctggccgcgccggcaaaatatccttacctgcgctgcacgcgcgtactgcagccgcggatggtattgacgattgaaccgggaatctactttattgaatcgctgctggcgccgtggcgcgaagggcagttcagcaaacacttcaactggcagaaaattgaagcgctgaaaccgtttggcggtattcgtattgaagacaacgtcgtgatccacgaaaacagtattgaaaacatgacgcgcgatctgaaactggcgtaatggaaagctggttgataccggccgcgccggccacctttgtggaagagatcaaaaagagccgctttatcacgctgttggcgcacaccgacggcgtagcggcggcaaaggcgtttgtcgagtcagtcagggcggatcacccggatgcccgtcaccactgcgtggcgtgggtcgccgggcctccgaatgactcgcagcagctggggttttccgacgatggcgaaccggcggggacggcgggtaaaccgatgctggcgcagctgatgggtagcggcgtcggcgagataaccgctgtcgtcgtgcgctactacggtggtattctgctgggcaccggcggcctggtcaaagcgtacggcggcggtgtgcaccaggcgcttgcgctgctgacaacacagcgcaagacgccgctgaccgcgtatactttgcagtgtgaatacgggcagttggccgggattgaaacgctgttggctcagttctcagggaaaattgtcgaaagcgaatatcaagcgtctgttcagctgcgcgtggcgcttcctcaggctgaagtggcgctattttcagcaaaactggctgattttagtcgcggttcgttgcaattactgaagattgacgaataatccccacctgatttttttgcatatcaaaggaagcgccagagatgcattttcgcgcgataacccgaatcgttggactgctggtcattttgttttcggggacaatgatcctcccgggattaatagccctgatatatcgcgatggtgcggggcgggcgtttacccagacctttttcgttgccctggcgatcggttcgctgctgtggtggcccaaccgtcgtgagaagggtgaactgaaatcccgcgaagggtttctcatcgtcgtgctgttctggacggtgctcggaagcgtcggttcgctgccctttatcttctctgaacagcccaacctgagcattacggatgccttctttgaatccttctcgggtctgacaacgaccggggcaaccacgctggttgggttagattcgttaccccacgccattcttttctatcgtcagatgctgcaatggtttggcgggatggggatcatcgtgctggcggtagcgatactgccgatactgggcgtcggggggatgcagctgtatcgggcggaaatgcccgggccgctgaaagataacaagatgcggccgcgcattgctgagacggcgaaaacgctgtggcttatctatgtcttactgacggtggcctgtgcgctggcgctgtggtttgccggcatgccggcgttcgacgccatcgggcacagcttctcgacgattgcgattggcggattctccacccatgacgccagcgtgggctactttaatagcccaacgattaactccattattgcgattttcttgctgatatcgggctgtaactacggcctgcacttttcattactcagcgggcgcagcctgaaagtgtactggcgcgatcccgaattccgcatgttcatcggcgtgcagctcacgctggtggtggtatgtaccctggtgctgtggctgcatgacgtctacagttcggcgctcatgacggtgaatcaggcgttctttcaggttgtatcgatggcgacaacggcgggcttcacgaccgacagcattgcgcgctggccgctatttttaccggtcctcctcctctgttcggcttttatcggcggctgtgccgggtcgactggcggtggtttgaaggttatccgtattcttctgcttttcaagcagggtaaccgtgagcttaaacggcttgtacatcctaacgcggtatatagtattaaactggggaaccgcgcgctgccggaacgtatcctggaagccgtctggggattcttctccgcctatgcgctggtgtttatcattagtatgctggcgattatcgccaccggcgtggatgatttctcggcctttgcttcggtcgttgcgacgctgaataaccttggcccagggctgggcgtggtggcggataactttgcgacgatgaaccctgtcgcaaaatggatcttgattgctaatatgctgtttggtcgtctggaagtgttcaccttgctggtgctatttactccgactttctggcgcgaataacaggagtgcctgtgaaaactttgattctcttttctacccgcgacggacagacgcgtgaaatcgcctcctatctggcatctgaattaaaagagcaggggattgatgcggacacgatcgatctcaaccgcaccaatgaagtggagtggcccttatacgatcgtgtcgtcatcggcgcatcaatccgctatggtcattttcatcccgccttagaacggtttgtaaaaacgcatcttcagtcgctgcaggcgctaccgggcgcctttttctcggtcaacctcgtcgcgcgtaagccagaaaaacgaacgccgcagacaaacagctacacccgcaagtttctgcttaactcgccgtggcagccgcagaactgcgcggtgtttgccggcgcgctccgctatccacgctatcgttggtacgatcggtttatgattcgccttattatgaagatgaccggcggcgaaacggatgtcagtaaagaagtggtgtataccgactggcagcaggtgggcagatttgcgcgggaaattgcgcaaatgaccagcaaatagcgcgttaaaccatcctggtgatggaaagttgagcgaacgaaaagttttttgaaatttccccttgtcacttcggaattactccctataatgcgctcccactgacacggaacaacggcttacagcccgccgggtcagcgggattcagcgatgaataccggcagagaaaagcgaaaataatcgcttgactctgaatgaggaaaacgtattatacgggacctcgcgacagagcgctgaagcgcgtcgcaactgctctttaacaatttatcagacaatctgtgtgggcactcaaagtgacatggattcttaatgtcttcggacaataaatgaataccaagtctctgagtgaacatacgtaattcattacgaagtttaattcacgagcatcaaacttaaattgaagagtttgatcatggctcagattgaacgctggcggcaggcctaacacatgcaagtcgaacggtagcacagagagcttgctctcgggtgacgagtggcggacgggtgagtaatgtctgggaaactgcctgatggagggggataactactggaaacggtagctaataccgcataacgtcgcaagaccaaagagggggaccttcgggcctcttgccatcagatgtgcccagatgggattagctagtaggtggggtaacggctcacctaggcgacgatccctagctggtctgagaggatgaccagccacactggaactgagacacggtccagactcctacgggaggcagcagtggggaatattgcacaatgggcgcaagcctgatgcagccatgccgcgtgtatgaagaaggccttcgggttgtaaagtactttcagcggggaggaaggcgataaggttaataaccttgtcgattgacgttacccgcagaagaagcaccggctaactccgtgccagcagccgcggtaatacggagggtgcaagcgttaatcggaattactgggcgtaaagcgcacgcaggcggtctgtcaagtcggatgtgaaatccccgggctcaacctgggaactgcattcgaaactggcaggctggagtcttgtagaggggggtagaattccaggtgtagcggtgaaatgcgtagagatctggaggaataccggtggcgaaggcggccccctggacaaagactgacgctcaggtgcgaaagcgtggggagcaaacaggattagataccctggtagtccacgctgtaaacgatgtcgacttggaggttgttcccttgaggagtggcttccggagctaacgcgttaagtcgaccgcctggggagtacggccgcaaggttaaaactcaaatgaattgacgggggcccgcacaagcggtggagcatgtggtttaattcgatgcaacgcgaagaaccttacctactcttgacatccagagaacttagcagagatgctttggtgccttcgggaactctgagacaggtgctgcatggctgtcgtcagctcgtgttgtgaaatgttgggttaagtcccgcaacgagcgcaacccttatcctttgttgccagcgattcggtcgggaactcaaaggagactgccagtgataaactggaggaaggtggggatgacgtcaagtcatcatggcccttacgagtagggctacacacgtgctacaatggcatatacaaagagaagcgacctcgcgagagcaagcggacctcataaagtatgtcgtagtccggattggagtctgcaactcgactccatgaagtcggaatcgctagtaatcgtggatcagaatgccacggtgaatacgttcccgggccttgtacacaccgcccgtcacaccatgggagtgggttgcaaaagaagtaggtagcttaaccttcgggagggcgcttaccactttgtgattcatgactggggtgaagtcgtaacaaggtaaccgtaggggaacctgcggttggatcacctccttaccttaaagaacctgcctttgtagtgtccacacagattgtctgatgaaaatgtagcagtaaaaaatctctgcaggcttgtagctcaggtggttagagcgcacccctgataagggtgaggtcggtggttcaagtccactcaggcctaccaaatttctgctgatgctgcgttgcggcgacactcacatactttagtatgcttcgtgtcaccacgccttgcctcaacagaaattaaggttgatgagatttaactacgatggggctatagctcagctgggagagcgcctgctttgcacgcaggaggtctgcggttcgatcccgcatagctccaccatctttactgcacaacacaagaaaacttcagagtgtacctgaaaaggttcactgcgaagttttgctctttaaaaatctggatcaagctgaaaattgaaacgacacactgttcaagtgtgttcgagtctctcaaattttcgcgacacgacgatgttttacgaaacatcttcgggttgtgaggttaagcgactaagcgtacacggtggatgccctggcagtcagaggcgatgaaggacgtgctaatctgcgaaaagcgtcggtaaggtgatatgaaccgttacagccggcgatgtccgaatggggaaacccagtgcaattcgttgcactatcgtttgatgaatacatagtcaaacgaggcgaaccgggggaactgaaacatctaagtaccccgaggaaaagaaatcaaccgagattcccccagtagcggcgagcgaacggggagcagcccggagtctgaatcagcttgtgtgttagtggaagcgtctggaaagtcgcagggtacagggtgatactcccgtacactaaaacacacaggttgtgaactcgaagagtagggcgggacacgtggtatcctgtctgaatatggggggaccatcctccaaggctaaatactcctgactgaccgatagtgaaccagtaccgtgagggaaaggcgaaaagaaccccggcgaggggagtgaaaaagaacctgaaaccgtgtacgtacaagcagtaggagcccactggttgggtgactgcgtaccttttgtataatgggtcagcgacttatattctgtagcaaggttaaccgtataggggagccgcagggaaaccgagtcttaactgggcgttaagttgcagggtatagacccgaaacccggtgatctagccatgggcaggttgaaggttgggtaacactaactggaggaccgaaccgactaatgttgaaaaattagcggatgacttgtggctgggggtgaaaggccaatcaaaccgggagatagctggttctccccgaaagctatttaggtagcgcctcgtgaactcatcttcgggggtagagcactgtttcggctagggggtcatcccgacttaccaacccgatgcaaactacgaataccgaagaatgttatcacgggagacacacggcgggtgctaacgtccgtcgtgaagagggaaacaacccagaccgccagctaaggtcccaaagtcatggttaagtgggaaacgatgtgggaaggcccagacagccaggatgttggcttagaagcagccatcatttaaagaaagcgtaatagctcactggtcgagtcggcctgcgcggaagatgtaacggggctaaaccatgcaccgaagctgcggcagcgacactatgtgttgttgggtaggggagcgttctgtaagccgttgaaggtggcctgtgagggttgctggaggtatcagaagtgcgaatgctgacataagtaacgataatgcgggtgaaaaacccgcacgccggaagaccaagggttcctgtccaacgttaatcggggcagggtgagtcgacccctaaggcgaggccgaaaggcgtagtcgatgggaaacaggttaatattcctgtactcggtgttactgcgaaggggggacggagaaggctatgttggccgggcgacggttgtcccggtttaagcatgtaggcggatgttccaggtaaatccggaacgtcactaacgctgaggtgtgatgacgaggcactacggtgctgaagtgacaaatgccctgcttccaggaaaagcctctaagcatcaggtaacatcaaatcgtaccccaaaccgacacaggtggtcaggtagagaataccaaggcgcttgagagaactcgggtgaaggaactaggcaaaatggtgccgtaacttcgggagaaggcacgctgatggtaagtgaagcgacttgctcgtggagctgaaatcagtcgaagataccagctggctgcaactgtttattaaaaacacagcactgtgcaaacacgaaagtggacgtatacggtgtgacgcctgcccggtgccggaaggttaattgatggggttatcctcgcggagaagctcttgatcgaagccccggtaaacggcggccgtaactataacggtcctaaggtagcgaaattccttgtcgggtaagttccgacctgcacgaatggcgtaatgatggccaggctgtctccacccgagactcagtgaaattgaactcgctgtgaagatgcagtgtacccgcggcaagacggaaagaccccgtgaacctttactatagcttgacactgaacactggtccttgatgtgtaggataggtgggaggctttgaagtgtggacgccagtctgcatggagccatccttgaaataccaccctttaatggctggtgttctaacgtgggcccgtaatccgggttgcggacagtgtctggtgggtagtttgactggggcggtctcctcctaaagagtaacggaggagcacgaaggtcagctaatcctggtcggacatcaggaggttagtgcaatggcataagctggcttgactgcgagcgtgacggcgcgagcaggtgcgaaagcaggtcatagtgatccggtggttctgaatggaagggccatcgctcaacggataaaaggtactccggggataacaggctgataccgcccaagagttcatatcgacggcggtgtttggcacctcgatgtcggctcatcacatcctggggctgaagtaggtcccaagggtatggctgttcgccatttaaagtggtacgcgagctgggtttagaacgtcgtgagacagttcggtccctatctgccgtgggcgctggagaattgaggggggctgctcctagtacgagaggaccggagtggacgcatcactggtgttcgggttgtcatgccaatggcattgcccggtagctaaatgcggaagagataagtgctgaaagcatctaagcacgaaacttgccccgagatgagttctccctgaccctttaagggtcctgaaggaacgttgaagacgacgacgttgataggccgggtgtgtaagcgcagcgatgcgttgagctaaccggtactaatgaaccgtgaggcttaaccttacaacgccgaagatgttttggcgatttgagaagacaacaatttcagcttagattcagagttgagtacgcaataaaagatggcgtactgagcacaaagaatttgcctggcggcactagcgcggtggtcccacctgaccccatgccgaactcagaagtgaaacgccgtagcgccgatggtagtgtggggtctccccatgtgagagtagggaactgccaggcatcaaacaagtgaagagcccatcctgacggatgggctttttgcgttttcgtcgtttaaaattgccagattttagtcacgccatggtacctgctccccctgacaatcaggaagccttccctcgctatatacggtaaactaatgcagattttgcatctggaagccattatgagccactcacttaagccctggaacaccttcggtattgaccgttctgccaaagcgattgtacgcgccgaaactgaaaaacagctactggatgcctggcaaaatgccaccgcagagcgccagccaaccctgatccttggtgaaggaagcaatgttctgttcctgaaggattattccggtacggtcattatcaaccgtattatggggatagaagtgagtgaaacatctgacacgtggcatttacatgttggtgcaggagaaaattggcatcagctggtccagtttgcgctaaataacggaatgccgggcctggaaaatcttgctttgattcctggctgcgccggctcctcgccgattcaaaatattggtgcttacggcgttgaattacagaaagtttgccgctacgtcgactgcattgagttggtcacgggtgtgaaacagcgtctttccgctgctgaatgtcgctttggctaccgggacagtatttttaaacatgaatatcaggaccgctacgccattgtggcggttggtttgacgttgccaaaagcctggcaacccgttttgacctacggtgatttaacccggctcgatccgcaaaccgttaccccgcagcaggtatttgacgccgtctgtcatatgcgcatgaccaaactccccgatccaaaagtgaatggaaatgcggggagcttctttaagaacccggtcgttagcgcggacaaggcgcaagcgctgctggcgacctatccgggtatccctcactaccctcagctggatggcagtatgaaacttgccgccggctggcttatcgatcaatgccagcttaaaggtaaagtgatgggtggcgcagcggtgcatagccagcaggcgctggtattgatcaatcagcatcaggcaaccagtgaagacgtggttgagctggctcattacgtacgccagcaggttggtgagaagtttaatatttggttacagccggaagtgcgctttatcggtgaaacgggtgaagttaatgccgaggagaccatcgcatgaaagactacaccgttcctttgacgctaatatcgatcctggccgacgctgaatttcactcaggtgaacagcttggcgagcgtttagggatgagtcgggcagcaatcaacaagcatattcaaacgttacgcgattggggagtcgacgtatttaccgttccgggtaaaggctacagtctccctgagcctatccagcttctggatgaagagcagatcgccaggcagatcgagcatggccgggtaaccgtactaccggtgattgattccacgaaccagtatcttctggacagacttagcgaactgcaatcgggtgatgcctgcgtggctgagtatcagcaggcaggtcgcggccgccgcgggcgcaagtggttctcgccgtttggttctaacctttacctttcaatgtactggcgactggagcagggccctgctgcggctataggtttgagtctggtcattgggatcgtcattgccgaggtgctgcaaagcctgggggcggataaagttcgggtgaaatggccaaacgatctctatttacaggatcggaagctgtccgggatcctggtggaactgacggggaaaaccggcgatgctgcgcagatagtcagcggcgcggggatcaacctcatgatgcgccgggtggagtctgatgttgtcaatcagggttggatcagcctccaggaggcagggatctctatcgatcgtaatacgttagcggcttgtctgattaaagagctgcgggcggggtttaaactttttgagaatgaaggtctggcaccctatctcacccgctgggaaaagctcgataactttattaatcgaccggttaaacttattattggcgataaagagatctttggtatttcgcgaggtattgatgctcaaggcgcattattactggagcaggacggggtggtaaaaccctggattggcggtgagatatcattgcgcagcgctgaataaaaaaaggggagctaacgctcccttttttattttcttaaacgcacctgattcaccgagtggtttgcgcttttggtcattataaggctggctcgctcacgggttggtagaatgttctcttttaaattcaaaagattaatctcattccacagcgatgtggcaatatcaattgcttcatctttagacagctgagcatagctatgaaaataggagtccgggtcggtaaacgcgccttcgcggaatttcagaaaacgattgatataccagttttttagcagttcttcaggcgcatcaacgtaaattgaaaaatcaacgaagtccgaaacaaatacatgatgcggatcgtgtggataatccatgccgctctgcagaacatttaatccctcaagaattaatatatcaggctgcgtgacggttttatccccatcagggatgacgtcgtaaatcagatgtgaatagaccggcgccgtagcgtcaggaacgccggatttcaggtctgagacgaatttaaccaggcgatgcatgtcataagactgcgggaagcccttcttcttcatcaggccgcgttctttcaataccgcgttaggatgcagaaaaccatctgtcgtgattaattctacatgtcgatgttcaggccagcggctcagcaatgcttgcagcacgcgcgcggtagtgctcttcccgaccgccacgctacccgcaatgctaatgatgtaaggaatacgttggccgttggtgccaaggaattgttccagtacagcctggcggcgcagattagagctgatatagaaattgagtaaacgcgacagcggcaaataaatttccgctacttcttccagggaaagatcttcgttgatgccttttaaccgcgtgatttcttcttctgttagcgtcatcggaacggaatcacgaagcgcagcccattggtcgcggttaaattgtagatacggtgtcattaacgtttgctcttttaggctcataagcatgctcttgcaaccgccgaattacatgaaggcggggtgcttcacactagttaatcaggacaatgggcaggagggtaacaccagattgcgaggaataataagaaaaaaactcattgaatgatgctttctaaaggtagcatcacagagatgaatggtttggtaaggggatataaagttctcagcagagacccgtgggttattcattgaatcgggtggtcaggtgatggggtatcgatgccgctttagcgacatcactctactttttgccctcctcggcaaccctgtccgtgaggatgattggcgtatttttgtcctgctctgtttgaaattacaccattttttctcgtttgagaacaaaatgtgagcaatagaacattttctgcaattttttagttgcatgaactcgcaggtctccctagaatgcgcgctacttgatgccgacttagctcagtaggtagagcaactgacttgtaatcagtaggtcaccagttcgattccggtagtcggcaccatcaagtgcctggtggggttcccgagcggccaaagggagcagactgtaaatctgccgtcatcgacttcgaaggttcgaatccttcccccaccaccatctttcggcaacgctttgcggagccagagttgattggttaaactggtcagctcaaacaaaaaaagagacgcttctcttttttttgttatagaaagaactgggtagccgagtttcaggatgcgggcatcgtataatggctattacctcagccttccaagctgatgatgcgggttcgattcccgctgcccgctccaaacgtgctgatatggctcagttggtagagcgcacccttggtaagggtgaggtccccagttcgactctgggtatcagcaccacttctttatctctcctcccctgtttctctcttgtttattgcattcaacaagtcgggcatgttgcccggttgatgtggtgatatcaccgatttatccgtgtcttagagggacaatcgatgtctaaagaaaagtttgaacgtacaaaaccgcacgttaacgtcggtactatcggccacgttgaccatggtaaaacaacgctgaccgctgcaatcactaccgttctggctaaaacctacggtggttctgctcgcgcattcgaccagatcgataacgcgccggaagaaaaagctcgtggtatcaccatcaacacttctcacgttgaatatgacaccccgactcgccactacgcgcacgtagactgcccgggccacgccgactatgttaaaaacatgatcaccggtgctgcgcagatggacggcgcgatcctggttgttgctgcgactgacggcccgatgccgcagactcgtgagcacatcctgctgggtcgtcaggtaggcgttccgtacatcatcgtgttcctgaacaaatgcgacatggttgatgacgaagagctgctggaactggttgaaatggaagttcgtgaacttctgtctcagtacgatttcccgggcgacgacactccgatcgttcgcggttccgctctgaaagcgctggaaggcgacgcagactgggaagcgaaaatcatcgaactggctggctacctggattcttacatcccggaaccagagcgtgcgattgacaagccgttcctgctgccgatcgaagacgtattctccatctccggtcgtggtaccgttgttaccggtcgtgtagagcgcggtatcatcaaagttggcgaagaagttgaaatcgttggtatcaaagagactgcgaagtctacctgtactggcgttgaaatgttccgcaaactgctggacgaaggccgtgctggtgagaacgttggtgttctgctgcgtggtatcaaacgtgaagaaatcgaacgtggtcaggtactggctaagccgggttctatcaagccgcacaccaagttcgaatctgaagtgtacattctgtccaaagacgaaggcggccgtcatactccgttcttcaaaggctaccgtccgcagttctacttccgtacaactgacgtgactggcaccatcgaactgccggaaggcgtagagatggtaatgccgggcgacaacatcaaaatggttgttaccctgatccacccgatcgcgatggacgacggtctgcgtttcgcaatccgtgaaggtggccgtaccgttggcgcgggcgtggttgctaaagttctcggctaattgctgataacatttgacgcaatgcgcaataaaagggcatcatttgatgccctttttgcacgctttcacaccagaacctggctcatcagtgattttttgggtcataatcattgctgagacaggctctgaagagggcgttaagtccgaaacgcagcagagcatttcggtttggtcgcctcgcatttcatgcggggtgaagttatttgtctgaattcttgtgacaggttggtttatgagtgcgaataccgaagctcaagggagcgggcgcggcctcgaagcgatgaagtggacaatcgtagtcgtgctgctgattgtggccatcgtcggcaacttcctttatcgtgacattatgctggcagtgcgtgcgctggctgtagtgattctgatcgctgcagcgggcggtgtcgcgctgttaacgacaaaaggtaaggcgacagtcgccttcgctcgtgaagcgagaaccgaagtccgcaaggtgatctggccgactcgccaggaaacgttgcataccacgctgattgttgccgcagtgactgccgtaatgtcactgatcctgtggggactggatggtattctggttcgcctggtatcctttatcactggcctgaggttctgagatgtctgaagctcctaaaaaacgctggtacgtcgttcaggcgttttccggttttgaaggtcgcgtagctacctcgttgcgtgaacatatcaaattacacaatatggaagagttgtttggcgaagtcatggtgccgaccgaagaagtggtcgaaatccgcggcggccagcgtcgtaaaagcgaacgcaaattcttcccgggctacgtgctggtccagatggtgatgaacgacgcgagctggcacctggtgcgcagcgtaccgcgtgtgatgggtttcatcggcggtacatctgaccgtccggcaccgatcagcgacaaagaagtcgacgcgatcatgaaccgtctgcagcaggttggcgataagccgcggccgaaaacgctgtttgagccgggtgaaatggttcgcgttagcgacggtccatttgccgactttaacggtgtggttgaagaagtggactacgagaagtctcgtctgaaagtgtccgtttctatcttcggtcgtgcaacgccggttgagctggacttcgctcaggtagaaaaagcctaacagccgatcaaaaaagcaacgttttaatcgttgcatgaggcgcggaattgacatacaatttcgcgccttttgtttttatgggtctgattcccataaagcgatatttatcacggggagcctttttaggcgctacacccaaacgaggaaatttacatggctaagaaagtacaagcctatgtcaagctgcaggttgcagctggtatggcaaacccgagtccgccggttggtccagcactgggtcagcagggtgtgaacatcatggaattctgcaaagcgttcaacgcaaaaactgaatccctggaaaaaggtctgccgatcccggttgttattaccgtttacgctgaccgttctttcaccttcgttaccaaaactccgccggcagcagttctgctgaaaaaagcggctggtatcaagtctggttccggtaaaccgaacaaagacaaagtaggtaaaatttcccgcgctcagctgcaggaaatcgcgcagaccaaagctgccgacatgactggttccgacattgaagcgatgactcgctccattgaaggtactgcacgttccatgggcctggtagtggaggactaagaaatggctaaactgaccaagcgcatgtccgtgattcgtgacaaagttgatgcgaccaaacagtacgacatcaacgaagccatctctctgctgaaagaactggctactgctaagttcgttgaaagcgttgatgttgccgttaacctcggcatcgacgcgcgtaaatctgaccagaacgtccgcggcgcgaccgtactgccgcacggtactggccgttcagttcgcgtagccgtatttgcccagggcccgaacgctgaagcagctaaagctgctggcgcagagctggtaggtatggaagatctggctgaccagatcaaaaaaggcgaaatgaactttgacgttgttattgcttccccggatgcaatgcgcgttgttggccagctgggccaggttctgggtccgcgcggcctgatgccaaacccgaaagtgggtaccgtaacgccgaacgttgctgaagcggttaagaacgctaaagcaggtcaggttcgttaccgtaacgacaaaaacggcatcatccacaccaccatcggtaaagtggattttgacgctgataaactgaaagaaaacctggaagctctgctggttgcgctgaaaaaagcaaaaccgactcaggctaaaggcgtgtacatcaagaaaatcagcatctccaccaccatgggtgctggcgttgccgttgatcaggctggtctgagcgcatctgcgaactaagattagctttacgtgggcggtggttttgtctacaattctacccccacgattctgttgaaatataacagagcactatgcgagtcatttgaattgcagcaaggcagcaagtgagtgaatcaccaggagcatagttaactatgtgactggtgtgaacgagcgcagctaacacagctgcggttcaaaggacgaagtcatagaaagaatttgttcgttggagcctggcctatccaggcctccgtcgaagaccgcaggtgtttcgcaagagacttaatgccctgcgtagacggtgacagaacgctaagattatttttggatactctggcttgtttctgctcaccgtattaagacgctcttctctttgagtcgagtgaagtgagttccggagcatgagctctggcaaacatccaggagcaaagctaatggctttaaatcttcaagacaaacaagcgattgttgctgaagtcagcgaagtagccaaaggcgcgctgtctgcagtagttgcggattcccgtggcgtgactgtagacaaaatgactgaactgcgtaaagcaggtcgtgaagctggcgtatacatgcgtgttgttcgtaacaccctgctgcgccgcgtcgttgaaggtactcctttcgagtgcctgaaagacacgtttgttggtccgaccttgattgcatactctatggaacacccgggcgctgccgctcgtctgttcaaagagttcgcgaaagcgaatgcaaaatttgaggtcaaagccgcagcctttgaaggtgagctgatcccggcgtcgcaaatcgaccgcctggcaactctgccgacctacgaagaagcaattgcacgcctgatggcaaccatgaaagaagcttcggctggcaaactggttcgcactctggctgctgtacgcgatgcgaaagaagctgcttaatcgcagttgtctttgtaaagcattcgcttacgtataaacttattctgatattcaggaacaatttaaatgtctatcactaaagatcaaatcattgaagcagtatccgctatgtccgtaatggacgttgttgagctgatctctgcaatggaagaaaaattcggtgtttccgctgctgctgctgtagctgtagctgctggcccggttgaagctgctgaagaaaaaactgaattcgacgtaattctgaaaggtatcggcgctaacaaagttgccgttatcaaagcagtacgtggcgcaactggcctgggtctgaaagaagctaaagacctggtagaatctgctccggccgctctgaaagaaggcgtgagcaaagatgacgctgaagcactgaaaaaatctctggaagaagctggcgctgaagttgaagttaaataagccaacctttccggttgcagcctgagaaatcaggctgatggctggtgactttttagtcaccagcctttttgcgctgtaaggcgccagtagaatttcacactgtttgactactggttgtcctgacaatgcttgtttctatagacgacttaatatactgcgacaggttagggctcctgagctgtgtaaatcgcaatgaaatggtttaagcgtgatagaaacaggtattgcggaaagtgttccattttccggtcaacaaaatagtgttgcataaaaaactgccttatgtgggcagatgggtcgacttgtcagcgagctgaggaaccctatggtttactcctataccgagaaaaaacgtattcgtaaggattttggtaaacgtccgcaggttctggacataccttatctcctttctatccagcttgactcgtttcagaagttcatcgagcaagatcctgaagggcagtatggtctggaagcagctttccgttccgtattcccgatcaaaagctacagcggtaactctgagctgcagtacgtcagctaccgtctgggcgaaccggtttttgacgttaaagaatgtcagatccgtggcgtgacctactcggcaccgctgcgcgtcaaactgcgtctggtgatctacgagcgcgaagcgccggaaggcaccgttaaagacattaaagaacaagaagtctacatgggcgaaattccgctcatgaccgacaacggtaccttcgttatcaacggtaccgagcgcgttatcgtttctcagctgcaccgtagcccgggcgtcttctttgacagtgacaaaggtaagacccactcttccggtaaggtcctgtataacgcacgtatcattccttaccgtggctcctggctggacttcgagttcgacccgaaagacaacctgtttgtccgtatcgaccgtcgtcgtaagctgccggctaccatcatcctgcgcgcgctgaattacaccactgagcagatccttgacctgttcttcgagaaagtggtctttgaaattcgcgataacaagctgcagatggaactggtaccggagcgtctgcgcggcgaaacggcctccttcgacatcgaagcgaacggcaaagtgtacgttgagaaagggcgtcgcatcaccgcacgtcacattcgccagctggaaaaagacgatatcaaacatatcgaagttccggttgagtacatcgctggcaaagttgcctctaaagactatgttgacgaatctactggcgagctgatctgcccggcgaacatggagctgagcctggatctgctggccaagctgagccagtctggccataagcgtatcgaaacgctgttcaccaacgatctggatcacggtccgtacatctctgagactgtacgcgtcgacccgaccaacgaccgtctgagcgcgctggtagaaatctaccgcatgatgcgcccgggtgagccgccgactcgtgaagcggctgaaagcctgttcgagaacctgttcttctccgaagaccgctacgatctgtccgcggtaggtcgtatgaagttcaaccgttctctgctgcgcgacgaaatcgaaggttccggtatcctgagcaaagaagacatcatcgaagtgatgaagaagctcatcgatatccgtaacggtaaaggcgaagtcgatgatatcgaccacctcggcaaccgtcgtatccgttccgttggcgaaatggcggaaaaccagttccgcgttggcctggtccgcgtagagcgtgcggtgaaagagcgtctgtctctgggcgatctggataccctgatgcctcaggatatgatcaacgccaagccgatttctgcggcagtgaaagagttctttggctccagccagctgtctcagtttatggaccagaacaacccgctgtctgagattacgcacaaacgtcgtatctctgcactcggcccgggcggtctgacccgtgaacgcgcaggctttgaagttcgagacgtacacccgacccactacggtcgcgtatgtccaatcgaaacgcctgaaggtccgaacatcggtctgatcaattccctgtccgtgtacgcacagacgaacgaatacggtttcctcgagaccccgtaccgtaaagtgactgacggtgttgtaaccgacgaaattcattacctgtctgctatcgaagaaggcaactacgttattgctcaggcgaactccaacctggatgacgaaggccactttgtagaagatctggttacctgccgtagtaaaggcgaatccagcttgttcagccgcgaccaggttgactacatggacgtatccacccagcaggtggtatccgtcggtgcgtccctgatcccgttcctggaacacgatgacgccaaccgtgcattgatgggtgcgaacatgcaacgtcaggccgttccgactctgcgcgctgataagccgctggttggtaccggtatggaacgtgctgttgccgttgactccggtgtaactgcggtcgctaaacgtggcggtaccgttcagtacgtggatgcttcccgtatcgttatcaaagttaacgaagacgagatgtacccgggcgaagcaggtatcgacatctataacctgaccaagtacacccgttctaaccagaacacctgcatcaaccagatgccgtgtgtctctctgggtgagccgattgagcgcggtgacgtgctggctgacggcccgtctaccgacctcggtgaactggcgctcggccagaacatgcgcgtcgcgttcatgccgtggaacggttacaacttcgaagactccatcctcgtttccgagcgtgttgtccaggaagaccgttttaccaccatccacattcaggaactggcgtgcgtgtctcgtgacaccaagctggggccggaagagatcaccgccgacatcccgaacgtgggtgaagctgcgctctctaaactggatgaatccggtatcgtttatatcggcgcggaagtgaccggtggcgatattctggttggtaaggtaacgccgaaaggtgaaacccagctgacgccggaagagaaactgctgcgtgcgatcttcggtgagaaagcgtctgacgttaaagactcttccctgcgcgtaccaaacggtgtctccggtaccattatcgacgttcaggtctttacccgcgacggcgtagaaaaagacaaacgtgcgctggaaatcgaagagatgcagctcaaacaggcgaagaaagacctgtctgaagaactgcagatcctcgaagctggcctgtttggtcgtatctacgcggtgctggtctccggcggtatcgaagctgagaagctcgataagctgccgcgcgatcgctggctggaacttggcctgaccgacgaagagaaacagaatcagctggaacagctggctgagcagtacgacgaactgaaacacgagttcgagaaaaaactcgaagcgaaacgccgcaaaatcactcagggcgacgatctggcaccgggcgtgctgaagattgtcaaagtgtatctggccgttaaacgtcagattcagcctggtgacaaaatggcaggccgtcacggtaacaagggtgttatctctaagatcaacccgatcgaagatatgccttacgatgaaaacggcacgccggttgacatcgtactgaacccgctgggcgtaccgtctcgtatgaacatcggtcagatcctggaaactcacctgggtatggctgcgaaaggtattggcgagaaaatcaacgccatgctgaaacagcagcaggaagtcgccaaactgcgcgaattcatccagcgtgcctacgatctgggcaccgacgtgcgtcagaaggttgatctgaataccttcactgacgaagaagttatgcgtctcgctgaaaacctgaaaaaaggtatgccgatcgcaacgccggtcttcgacggtgcgaaagagtctgaaatcaaggaactgttacagcttggtggcctgccgacttccggccagatcaccctgttcgacggtcgtaccggtgagcaattcgagcgccaggttaccgttggctacatgtacatgctgaaactgaaccacctggttgatgacaagatgcatgcgcgttctaccggttcttacagcctggttactcagcagccgctgggtggtaaggcgcagttcggtggtcagcgcttcggggagatggaagtgtgggcgctggaagcatatggcgcagcatacaccctgcaggaaatgctcaccgttaagtctgatgacgtgaacggccgtactaagatgtataagaacatcgtggacggcaaccatcagatggaaccgggcatgccggaatccttcaacgtactgttgaaagagattcgctcgctgggcatcaacatcgaactggaagacgagtaactctcgctcaaacaggtcactggtgccggggtaagacccggcgccagattgtgctaactccgacgggagcaaatccgtgaaagacttattaaagtttctgaaagcgcaaactaaaaccgaagagtttgatgcgatcaaaattgctctggcatcgccagacatgatccgttcatggtcttttggtgaagttaaaaagccggaaaccattaactaccgtacgttcaaacctgagcgtgacggccttttctgtgcgcgtattttcgggccagtaaaagactacgagtgcctgtgcggtaagtacaagcgcctgaaacaccgcggtgtgatctgtgagaagtgcggcgttgaagtgacccagactaaagtgcgccgtgagcgtatgggccacatcgagctggcgtctccgaccgcccacatctggttcctgaagtctctgccgtcccgtatcggcctgctgctcgatatgccgctgcgcgatatcgaacgcgtgctgtacttcgaatcctatgtggttatcgaaggcggtatgaccaacctggaacgccagcagatcctgactgaagaacagtatctggacgcgctggaagagttcggtgacgaatttgacgcgaagatgggtgcggaagctatccaggccctgctgaagagcatggatctggagcaagagtgtgaaactctgcgcgaagagctgaacgaaaccaactccgaaaccaagcgtaagaagctgaccaagcgtatcaaactgctggaagcgttcgtccagtctggcaacaagccggagtggatgatcctgaccgttctgccggttctgccgccagatctgcgtccgctggttccgctggatggcggtcgtttcgcgacttctgacctgaacgatctgtatcgtcgcgtcattaaccgtaacaaccgtctgaaacgtctgctggatctggctgcgccggacatcatcgtacgcaacgaaaaacgtatgctgcaggaagcggtcgacgccctgctggataacggtcgtcgcggtcgtgcgatcaccggttctaacaaacgtcctctgaaatctttggccgatatgatcaaaggtaagcagggtcgtttccgtcagaacctgctcggtaagcgcgttgactactccggtcgttctgtaatcaccgtaggtccatacctgcgtctgcatcagtgcggtctgccgaagaaaatggcgctggagctgttcaaaccgttcatctacggcaagctggaactgcgtggcctcgccaccaccatcaaagccgctaagaaaatggttgagcgtgaagaagctgtcgtttgggatatcctggacgaagtgatccgcgaacacccggtactgctgaaccgtgcaccaaccctgcaccgtctgggtatccaggcatttgagccagtcctgatcgaaggtaaagctattcagctgcacccgctggtttgtgcggcatacaacgccgacttcgatggtgaccagatggctgttcacgtaccgctgacgctggaagcccagctcgaagcgcgtgcgctgatgatgtctaccaacaacatcctgtctccggcgaacggcgaaccaatcatcgttccgtctcaggacgttgtactgggtctgtactacatgacccgtgactgtgttaacgccaaaggcgaaggcatggtgctgactggcccgaaagaagctgagcgtatttatcgcgctggcctggcctctctgcatgcgcgcgttaaagtgcgtatcactgaatacgaaaaagatgctaacggcgaattcgttgcgaaaaccagcctgaaagacacgactatcggccgtgccattctgtggatgatcgtaccgaaaggtctgcctttctccatcgtcaaccaggcgctgggtaagaaagcgatctccaaaatgctgaacacctgctaccgtattctgggcctgaaaccgaccgttatttttgcggaccagacgatgtacaccggctttgcttatgcagcgcgctcaggtgcatccgttggtatcgatgacatggtcatcccggagaaaaaatacgagatcatcagcgaagcggaagcggaagttgctgagattcaggagcagttccagtcgggtctggttaccgctggcgaacgctacaacaaagttatcgatatctgggccgcggcgaacgatcgtgtatccaaagcgatgatggacaacctgcaaactgaaaccgttattaaccgtaacggcgaagaagagcagcaggtctccttcaacagcatttacatgatggccgactccggtgcgcgtggttctgctgcacagattcgtcagcttgccggtatgcgtggtctgatggcgaagccggatggctccatcatcgaaacgccaatcaccgcgaacttccgtgaaggtctgaacgtactccagtacttcatctccacgcacggtgcgcgtaaaggtctggcggataccgcactgaaaacggcgaactccggttacctgactcgtcgtctggttgacgttgcgcaggacctggtcgtgactgaagacgactgtggcaccctggaaggcatcaccatgaccccggttatcgagggtggcgatgttaaagagccgctgcgcgatcgcgtactgggtcgtgtgaccgctgaagacgttctgaagccgggtacggcggacattctggttccacgcaacacgctgctgcacgagcactggtgcgatctgctggaagagaactccgttgactccgtcaaagtgcgttccgttgtatcctgtgacaccgactttggtgtatgtgcgcactgctacggtcgtgacctggcgcgtggccacatcatcaacaaaggtgaggctatcggcgttatcgcagcacagtccatcggtgagccgggtacacagctgacgatgcgtacgttccacatcggtggtgcggcatctcgtgcggctgctgagtccagcatccaggtgaaaaacaaaggtagcatccgtctgagcaacgcgaagtcggttgtgaactccagcggtaagctggttattacttcccgtaataccgagctgaaactgatcgacgaattcggtcgtaccaaagagagctataaagtgccttacggctccgttatggcgaaaggtgatggcgagcaggttgccggcggtgaaaccgtagcaaactgggatccgcacaccatgccggttatcaccgaagtgagtggttttgtccgcttcactgacatgattgacggccagaccattactcgtcagaccgacgagctgaccggtctgtcttctctggtggttctggattctgcagagcgtaccactggcggtaaagatctgcgtccggcgctgaaaatcgttgatgctcagggcaatgacgttctgatcccgggtaccgacatgcctgcgcagtacttcctgccgggtaaagcgattgttcagctggaagatggcgtccagatcagctctggtgacaccctggcgcgtgtaccgcaggaatccggcggtaccaaggacatcaccggtggtctgccgcgcgttgccgacctgttcgaagcgcgtcgtccgaaagagccggcaatcctggctgaaatcagcggcatcatttccttcggtaaagaaaccaaagggaaacgtcgtctggttatcaccccggtagacggtagcgatccgtacgaagagatgattcctaagtggcgtcagctcaacgtgttcgaaggtgaacgcgtagaacgtggtgacgtggtttccgacggtccggaagcgccgcacgacattctgcgtctgcgtggcgtgcatgctgtgactcgttacatcgttaacgaagttcaggacgtataccgtctgcagggcgttaagattaacgataagcacatcgaagttatcgttcgtcagatgctgcgtaaagcgaccatcgaaagcgccggtagctccgacttcctggaaggcgaacaggttgaatactctcgcgttaagattgctaaccgcgatctggaagcgaacggcaaagtgggtgcaacattctcccgcgatctgctgggtatcaccaaagcgtccctggcaaccgaatcgttcatctctgccgcatcgttccaggagaccacccgtgtcctgaccgaagcagccgttgcgggtaaacgcgacgaactgcgtggcctgaaagagaacgttatcgtgggtcgtctgatcccggccggtaccggttatgcgtaccaccaggatcgtatgcgccgtcgcgcagcgggcgaactgccagcagcgccgcaggtcagcgtggaagaagcttctgctaacctggcagaactgctgaacgcgggtctgggcggttctgacaacgattaatcgttgattcgctaaacgctcaaaaagccagtcaggtcacctgactggcttttttattgcttgccagtttattccgtctacttttttattacattttattgatgtaatagctgcaattaattagcaaatataaaccactcctataatgatttatttccatgactgtttttcatcttcaatgaaagggtgaaaattctacgcgtgtcaaaaaataagcaccgcaaacgctatatagtcaaaaaactaaaataatcatgtgattactttcccggttcttttcggtttaccgcagccgaggggattgttacgcctgttaaaaggcgatggaggaggtgaactaataaaaacaaagcggagagtattgtcgttatttaatggatagcttctgggggatgtatggaatttgctatacaacttatcattatcttaatttgtttgttctatggtgcgagaaagggcggcattgcgctcggtcttttaggcggtattgggctagttatcctggtctttgtttttcacctgaagcctggaaaaccgcccgtcgatgtcatgctggttattatcgccgtcgtggcggcatcggcgacgctgcaggcttccggtggtctagacgtgatgctgcagattgccgagaaactcctgcggcgaaacccgaaatatgtctcgatcgtcgcgccattcgtcacctgtacgctgacgattctttgcggcacggggcacgtggtatataccattctgccgattatttatgatgtcgccatcaaaaataacatccgtccggagcgacccatggccgccagctcgatcggcgcacagatggggattatcgccagcccggtttccgtggcggtcgtctcgctggtggcaatgcttggcaactttacctttaacggcaagcaccttgaatttctcgacctgctggcgataaccattccgtccacgctgctggggattctggccattggtatcttcagctggtttcgcggcaaagacctcgataaagacgaaactttccaggcctttattgcggtaccggaaaaccgtcactacgtgtacggggacacggccacgctgctggatagaaagcttccgaccagcaactggattgcgatgtggatttttctggcctcaatcgcggttgtcgccctgctcggcgccttctccgaactgcgtccggcattcgacggtaagccgctgtcgatggtgctggtgatccagatgtttatgctgctctccggggcgctcatcatcatcattacgaaaacgaatccggcttcgatctccaaaaatgaggtgttccgttccgggatgatcgctatcgttgccgtgtacggcatcgcgtggatggcggaaacgatgttcggcgcgcacatgaccgagattaaaggcgtgctcggggagatggtgaaggagtacccgtgggcctacgctatcgttctgctgctggtatcgaagtttgttaactcccaggcggctgcgctggcggcgatcgtcccggtggcgttggcgattggcgtcgatccggcctacatcgtcgcttccgcgcccgcctgctacggctattacattctgccgacctacccaagcgatctggcggcgattcagttcgaccgctcaggtactacgcatatcggccgctttgttattaaccatagctttattctgccagggctcattggcgtcagcgtctcatgcgtctttggctgggtatttgcagcgatgtacggatttctttaagaggatacgggcgccggtagcggcgcctgttaagtcgttgacgttattgtgcgagcggaattcggcgatagagctcaatcatgtcggtagccagatcctgaatgaccatcgcgttcatcaggtggtcctgagagtgtacggtaatcaggttaaccggaagcttgccgctgccttcatccatgccaatcagctgggtctggattttatgcgcatgcttgacgaattcatgggattccgccattgcctgttcggccgcagcaaaatcgcctttacgcgccagctgcagagcggttaacgccgagctgcgcgcagaaccggcgttaaccagcagctccatgatgatcgtttctaaatcttccatctcttactccatcagcttcagggctttatcaagcacggcatcgcctttcatcatgccgtaatccatcatatcgatgacggcgacttttttaccaaacgggtcggccattgcctgtagcttggcctgctcgtacttcacctgagggccgagcaggataatatcggcagcggcaagattatctttaaactcggcaaccggtacggctttgatggagacttccacgcctttttgttgcgcagcggcctgcatacgttgaaccagcatgctggtggacattcctgcggcacagcataaaacgatattcttcataattgttggcccttatgttccttgatgtaccatctttatcgcgggcaggcgggcgggacaaccgctttacggtgattgtgtgtaagtcatcacaaaataatgaaaccggtttcggtttttggggcgaaaacgctaaaagccgcgtccgacaggcctgaaacggtgggctctgttaagcgcggacgatgcgattcttgcccagctgcttggctttatacagcgcttcatcaacgcgcacgacaagctgctccaggggctccatattccattcgccgagacctgcgctgaaggtgaccgtcaatccttcttcacgccaggagcgctgcgcgacgcgggcccgccagctctcaagcagcatcagggcgtcatcgctatgtccggtggtaaagatcgccgcaaactcttcgccgccgtagcggtaaagcgaaatttgccggggctggaggatttgcagcccttcccgggcgacattgcgcagcacgatatcgccgttgaggtgaccccaggtgtcgtttatcgttttgaagttatcaatatcaaccagcgcaagagaaaagggctgatgatcgttcatcagcgcggcgatatcgctgtcaaaggcgcggcggttcttgcagccggttagcgcgtcgatggtcgcctggcgaacgtaggttaactcgcgctgcttattgctctcgatggctttgctgagcatcgcttccagccgcggggcgcgctgaacatccccggttttaatcgcattgatgatgttcatcaacaccgtacgcgaagcatggcgcagatacagtccaaacagcacgataacgatcgcggccagggcaaagctccaggcgacgatatccgtttcatggcgcgttaagttgaccagcgtcgagttatcgacccgataaataacaaaccagtcggggttggtaaaggagtagtaatagtaccaggtgtccgtattggtgtcgtacagctggccttcgccgctggtcattctgtccatcaaggcttcactgacgtagggtttaaacaaagcgccgggatcgggatggagaacgactttaccatcgcgttgcaccacaaaaaactccccctggacgggtgcaaccatctgccgtaacgcgtagcccattgaggtgagatcgagatgaaacgcgagactgccctttagccgtccctctggagaaattatgggtttgtagacggtaatcgtcgggtgatgcgtgaagtagtcgttgtacgggctggtataccgactgaaggtactggcttccgcttgcttaataaaccacggccttgttttggcatcgaaggactggctgtcttcggtttccagaacctcgggcgcgcgcagatagtgcccattggtatccgccagcgagatggacgaaacggtctgcatcatattttgcaactgcataagctgcatcaaccctttttccggattgacgttaaccgcctcattcagcgcatcgttgcgggcaaagaaggtggcggcacgggtgaggataaagtcgttgccctgcagcagcgtctccgtgtagttggtcgccatattgtgggtaaaattgcgattaatatgatgataatcttcgagaaaatcattcctctgcgtcgtcgtggcaaacaccgctatcagcaagaagctgaataaaatacctgcaaatccgatgataatcggcgtggtgaaagagagctttctattatgacgagccatgagtcgtaaatcgttccagaagcgttaaaccgtgggtggagacgcaggtttagccagcatgcctgctgagcgaatcagataaaactccggtaattataacgctgacgttgtgatatggactgattaatattcgatattgatggcattaccgttgccacaaagaggcgggagcagggcgaaaaggaggaagagtgaatattcgccctggtcagcgtccgctgctgacaggggcagaatagagaaacgggaacagggccacaatctcccgtttctcttattaagatcgtgcatgaagaacgtttaagaaattacattcgttatcatgacgattgggaggcgcgtcccagccagctgtcccaatccttccataccggctgtagaccgctggccaccagcgcgctggcgacctcttccgggcggcggtcatcgtgaggcgcgaactgctccagctccggatggttatcggcatacccgccgggctgggttttcgaaaaggcgctgacgttgttgatggccagcgggatcacccgatcgcggaaccagggggattcgcgggtggagagcgagagttccacttccggagccagcaggcggaaagcgcaaatagtttgcaccagctgccgttcatccattaatgaggcgggctcgatacctcccgcgcaaggccgcagtcgtgggaaggagatggagtagcggctgcgccagtaatgctgctggagccacagcagatgctccgccaccataaagcagtccacccgccagctgtcggaaaggccaataagtgcgccaaggccaattttatcaatccccgcctgcccaagcctgtccggcgtatccagccgccagaagaagtcctgctttttccctttcagatggtgtttcgcatacatgctttcatgataggtctcctgatagaccatcaccccgtccagaccgagggttttcagctcggcgtactcttccatcgccagcggctggacctccatatgcagcgaggcgaactggcggcgaatcgcgggcagatgttgacgaaagtagtccatgccgaccttgccctgatgttcgccggtcaccagcagcagatgctcaaagcccatttcgcggatcgccgcgcattcacgggctatttccgcctcatccagagtcttgcgcttgatgcggttactcattgagaaaccgcagtaggtacagtcgttggcgcagagattagagagatacagcgggacataaaagctgacggtattaccaaaacgctggcgagtcaggcgctgagcgcgctgggccagaggctccagatagtccgcggcggcgggggagagcagggccatcatatcgtcgcggctgagctgtttggccgccagggcgcgttcaacgtcggcgggagttttcccgttgattcgcaggcgaatatcgtcccagtccagctgccgccaacggtcagtgaaggtgttcatatccgcgcctccagaaagccggtcagcgggctggtggcctgcgcctgcgcgctgcgcgcgcccgggcctgcctgtcgggccagcaagccggcatcgattgctaaacggaaggcccgcgccatggttaccggatcgtcggcaacggcgatggcggtattcaccagtaccgcgtcagcgcccatttccagcgcctgcgccgcgtgactcggcacgccaatacccgcgtcaacgactaccggcaccgtggcctgcgcgataataatctccagcattgctttggtttccagtccctgattggagccgatgggcgcgccgagcggcatcaccgccgcgcagcccgcttcttcaaggcgcttgcacagcaccgggtcggcgccgcagtagggcagcaccacgaagccttcccgtaccagaatctccgccgctttcagcgtttcgatcggatcggggagcagccagcgggcgtccggatgaatttccagcttcagccagtgggtgcccagcgcctcccgcgccaggcgggcggcaaataccgcctcttccgccgttttggcgccggaggtgttgggcagcaggctaacgccggccgccagcagcggcgcgaggatcgcgtcattatgctgacggagatcgacgcgcttcatcgccagcgtcaccagctggctgccggaggcgcgaatggcctccaccatgacgtcgggggcggcgaatttaccggtgccggtgaaaagatgtgactcaaaggttttatccgcaatacgtaacatgtcagcctccagcgataacctgaaaaagcaggatttgatcgccttcctgtaagagatgatcttgccactgttcatgcggcaggatgcgttgattgagcgccagcgcgacgcccggctgctgctgttccagctgcgtgagcagatcggcgacggaggtcgcttcggcgcactgcaacggttcatcgttaaaccatatccgcatgctgccctccgcataccggacagccctgagcccgctggagcgcgagagtgcgccagctgctggttcgggcatcgaacaggcgcagcgtgttccgcggggccatcatgccggcgagcagcttgatggcctccagcgcctgtagggtacccatcatgccaaccaccggaccgataatgcccgccgtacggcagttgcgctcaggctcgttagcgtccggccacagacagcgatagcagccctgctcccacggcggcgtcagtaccatcagctgccccccaagcccgacggcactggcggtaatcagcggcgttttaagcgcgacgcaggcggcgttgatcgcctgacgagtcgccatgttatcggtgcaatccagtaccacatcggccttcgccacttcatcccgcagggcctttccgcctaaccgctgcttcagcgcaatcagttcaatctgcggatttaactgagccaaccgggccctggcggccgtggttttaggctgagcgatatcctcgctggtgaacaaaatttgtcgctgcagattactgacgtgcacgtcgtcgtcgtcgaccagcaccagcgtgccgacgccagctccggcaagatagagcgcggcgggagagcccagcccgccgaggcccacgatcaacacccggctggccagcagcttttgctggccttcaatggcgatatcctccagcagcagctggcggctatagcgcataaaatcgctgtcattcatcaccggctcccgctatctcgagcagccggaccgttgcctgtcgccagtcggccgcctgagtaatggcgctgaccaccgcaacgctgccgacgccggtcgccagtaccgccggggcgcgctcaaggctgatgccgccaatcgccacggttggataatccccgagtcgctgaatatgctgcgccagctgatccagcccctgaggggcggaaggcatctgcttggtttgcgttggaaaaacgtgcccaagcgcgatgtaagagggacgcgccgccagcgcgatatcaatttccatatcgtcatgcgtcgaaacgccaaggcgtagcccggcgttgcggatggcgctgaggtcggtcgtttccagatcctcctggcctaaatgcacgccgtaagcctgatgtttgatggccaggcgccagtaatcgttaataaacagccgcgcatggtatttgcgtcccagagcgatagcggcaacgacatgctcttcaacctcactatcgcgtttatccttgatgcgcagctggagagtgcgaacgcccgcggccagcaggcgttcgatccacgtgacgctatcgacgaccggatagagccctaaacggaaagggacggatggaaaatcgggttgatacatcaggcttcctccttacgtagatagatttcactgccgcgggcgcggaagttatccgacatatcggccatccccacttcgatggtctgcgcggcggcgtagtcgcgaacttcctggcttatcttcattgagcagaatttagggccgcacatggagcagaagtgggccactttgcctgactcctgcggcagggtttcgtcgtggtaagcgcgcgcggtgaacgggtcgagcgccagattaaactgatcttcccagcggaactcgaagcgcgctttcgacatggcgttatcgcggatctgcgcgccgggatggcctttggcgagatcggcggcgtgggcggcaattttgtaggtaatcaggccctgcttaacgtcttctttattcggcaggccgaggtgctcttttggcgtcacgtagcagagcatcgcgcagccgaaccagccgatcatggcggcgccaattcccgaggtgaaatggtcatagcccggcgcgatatcggtggttagcggccctaaggtgtagaacggcgcttcgtggcagtgctccagctcttcggtcatattgcgctgaatcatctgcatcggcacgtggcccgggccttcgatcatcacctgtacgtcatactcccaggctattttggtcagttcgcccagggtgtgcagttcggcgaactgcgcttcgtcgttggcatcctgaatcgagccgggacgcaggccgtcgcccaatgacagcgagacgtcataggcggcgcagatttcgcagatttcgcggaaatgctggtagaggaaattctctttgtgatgggacaggcaccatttcgccatgattgagccgccgcgggagacgatgccggtcaggcgcctggcggtcatcggcacgtagcgcagcagcacgcccgcatggatggtgaagtagtccaccccctgttccgcctgctcgagcagcgtgtcgcggaaggcttcccaggtgagatcttcggcgatcccgctgaccttctccagcgcctggtagatcggcaccgtaccgatcggtaccggactattgcgcaggatccactcgcgggtctcgtgaatatagcggccggtggagaggtccatgaccgtatccgctccccagcgcgtcgcccacaccagcttctcgacctcttcttcaatcgacgaggtgaccgccgagttgccgatattggcgttaaccttcacgaggaagttgcggccaataatcatcggttcggattccggatgattaatattggccgggataatcgcgcgcccggcggcgacttcagcccgcacaaactccggggtgatattctccggcagccgcgcgccaaacccaacgcccggatgctgctggcgcagcacttcgccacgaatacgctcgcggcccatattctcgcgaatggcgatgaactccatttccggggtgacaatcccctgacgggcgtagtgcagctgcgtcacgcatttcccgacgatggcgcgcctgggcgtgagcaggccggtaaagcgcagttcgttgaggccatcatccgccagccgctctctggtataggccgagctgcgatcgctgagtgcttcgcagtcgcggcgcgcatcaatccacggctgacgcagctttgccagaccctgctgaacgttaatcgcgacgtgcggatcgccataggggccggaggtgtcatagaccggaatagcttcgttcgcttcgtactgaggattatctttgctgccgccgataagcgtcgggctcagctgaatttcgcgcatcggtacgcgaatatcttcctgcgaaccggggatatagatgcgctgcgaattgggaaatgcggtaccttccagggtgtcgataaagcgctgggcgcgttcgcgttgctctcgacgcgtgagtttggttgtagacatagctcattccagttaaacaggatatggcttgccagacgacggatggagtaacggatgcgatcggccctgaagaggctgatgctaaacgcagtttactcttgttcccttcgcaggtattagcctgatcaggttccgcggatcccgaattaacggtctcagccttttccagtgtggaaaatgggcactccgacaagatgacatcccctctccgtgaggggggaatgtatgtaaactacgcgttaatggctcacaactcaagcggtcggcgcgatattgtcgctgacgttgtctttgcggctgtgggcgacggcgagggcgatcaggttatcttccagcgcaaagcgcgcttccagcgcttcgccgatgtccgacagcgcctgctggaactcaaggtagttatcgtgatcgatggcgttttcgaggcaggagtcgtaataatccatgatctgctgggtattagcctgcagctgtggataaatcttagtggcggctaaaagtggcgtattgccttccaattcgccgataaagcgttcataaatattaaaatggccggaggagaggtagtccaccaggctttgacaaaaatcatccagcgctttctcattaagccgcataaatgattctttgccgggcttcaggccaaccaggttgtagtaagccacaagcaaatgcttacgtacttgtagccagcgatcgaccagtttattgctgcctccaacacgttccgtcaggttttccagctggtttaacatggttgactccgcaaggttttaagagaaatacgttgctcaccaaaatgtaaatttaatgttaaaagtgccagtaaaataaaggtagtgcaatagatatggatcgtattattgaaaaattagatcgcggctggtggatcgtcagccacgaacagaaattatggttgcccgacggagaattgccctacggcgaagcggtaaattttaatcttgcggggcagcccgcgctgcgaatcggagaatggcagggcgatccggtgtggctggtccgccaggatcgccggcatgagatgggatcgctgcgtcaggtgctcgatcaggatgctggcctttttcaactggcggggcgcgggatccagctggcggagttctaccgatcgcataaattctgcggctactgcggtcatcctatgcaccccagcaaaaccgagtgggcaatgctgtgcagccactgccgcgaacgctactacccgcaaatcgccccgtgcattatcgtcgccatccgtcgggatgattctatcctgctggcgcagcatactcgccatcgcaacggcgtgcatacggtgctggccgggtttgtcgaagtcggcgaaaccctggagcagaccgttgcccgcgaggtgatggaggagagcggcattaaggtgaaaaacctgcgctacgtgacctctcagccctggccgttcccgcaatcgctgatgaccgcgtttatggccgagtacgatagcggcgagattgtcatcgacaagaaagagctgctggaggcgggatggtatcgctatgacaatctgccgcttttgccgccgccgggcaccgtggcgcgccgtctgattgaagataccgtggcgatgtgtcgggcagagtatgagtgacatgttacatacactttatccttcaaattgcctctttgttggctgctttcacttaccccagtcacttacttgagtaagctcctggggttcattcaattgccgcctcgatccactttgaatgattttgtgtataaacttggcgcatcaacgctaaaggaatgtaaaaatgaccgaactgaagaacgatcgctacctgcgcgcgctgctacgccagccggttgatgtcaccccggtatggatgatgcgacaggcgggccgctatttaccggaatataaggccacccgcgccgaggcgggcgattttatgtcgctgtgtaaaaacgccgagctggcctgtgaagtgacgctgcagccgctgcgccgctataagctggatgcggctatcctcttctcggacattctcaccatcccggatgcgatggggctggggctctatttcgaagccggggagggcccgcgttttacctcacccattaccggcaaagcggatgtcgataaattacccgtacccgacccggaagatgagcttggctacgtgatgaacgccgtgcgcaccatccgccgtgagctgaagggagaagtgccgctgattggcttttccggcagcccgtggacgctggcgacctacatggtggaaggcggcagcagcaaagcgtttacggtgatcaaaaagatgatgtacgccgagccgcaggccctgcatgcgctgctcgataagctggcgaaaagcgtcacgctgtatctgaatgcgcaaatcaaagcgggcgcgcagtcggtgatgatttttgatacctggggcggggtgctgaccggccgggattatcagcagttctcgctctattacatgcataaaatcgttgatgggctgctgcgtgagaacgatggccgccgcgtgccggtgacgctgtttaccaaaggcggcgggcagtggctggaagcgatggcggaaaccggctgcgatgcgctgggactcgactggacgaccgatatcgccgatgcgcggcgtcgcgtcggccataaagtcgccctgcagggcaatatggatccctcgatgctgtatgcccctccggcgcgcatcgaagaagaggtggcgaccattcttgccgggtttggccagggcgaaggccatgtctttaacctcgggcacggcattcatcaggacgtcgacccggaacatgcgggcgtatttgtggaggcagtgcaccggttgtcggcgccataccaccgttaaggagtgaatatggatttgtcatcgctacgcacccagcagctcagcctggcggcatcggttgaacgaggcgatcggctggaccaggatccgctgacgctgatcggcggagcggatgttggatttgagcaagagggagaggtgacccgggcggcgatggtgctgctgagctatccgtccctggagctggtggagtatcaggtcgcgcgcgtcgcgaccacgatgccctatatccccggattcctctcctttcgcgaaacccccgcgctgctggcggcctgggagcagctttcgcagaagccaaatctcttatttgttgatggccacggtatttcccacccgcgccgcctcggcgtcgccagccattttggtctgctggtggatgtgccgactatcggcgtggcgaaaaaacggctgtgcggtaagttcgagccgctgggcgatgagcccggcgcgctggcgccgttgttagataaaggcgagcagctggcgtgggttttgcgcagtaaaacgcgctgtaatcccctgtttgtgagtaccgggcaccgcgtgggcctggatagcgcgctgatgtgggtggagcgctgtctgaaaggctaccgcctgcccgagccgacgcgctgggctgatgccgtggcgtcccggcgtccggcgtttgtgcgttggcaagcaaatcacgattgattcaggtacactgcggctaatttctgacttcgagatttcatcatgttacaaaacccgattcatctgcgtctggagaagctggaaagctggcagcacgtgacctttatggcctgcctgtgcgagcggatgtaccccaactacgccatgttctgtcagcaaactgagttcgccgatggccagctttatcgccgtattctcgatctgatctgggaaacgctgacggtaaaagatgcgaaggtgaattacgacagccagctggaaaagctggaagaggcgattccggccgctgatgattacgacctgtacggcgtctatccggccattgatgcctgcgtggccttgagtgagctgattcattcgcggctgagcggcgaaacgctcgaacatgctattgaagtcagcaagagctcgatcaccaccgttgcgatgctggaaatgacccaggctggtcgcgaaatgaccgacgaagagctcaaggaaaacccggctgtcgaacaggaatgggatattcagtgggagattttccgtcttctggccgactgtgaagaacgcgatattgaactgatcaaagggctgcgtgcagaccttcgcgaggccggtgagagcaatattggtataaattttcagcaatgagaccagaaaacgtgatttaccgcctgaattgtagcgtctgaaggcatccattccgccccccgtctggtctacatttggggggcgaaaaaacgtggctatcggtgcgtgtatgcaggagagtgcttttcaggcatttccgtcgcactcgatgcttagcaagcgataaacacattgtaaggataacttatgaacaagactcaactgattgatgtaattgcggacaaagctgacctgtccaaagcacaggcgaaagctgccctggaatctaccctggctgcaattaccgagtctctgaaagaaggtgatgctgttcaactggttggtttcggtaccttcaaagtgaaccaccgcgctgagcgtactggccgcaacccgcagaccggtaatgaaatcaaaatcgccgcagcaaacgtaccggcatttgtttctggtaaagctctgaaagacgcagttaagtaagaccgcgtggcagtgtacagttttatcgaaggggcttgtcggccccttttgtctacctggcgccgcacgctggcgctggtaggcgtattgctgctcactgcctgcagccatgattcctctctcccgccgtttaccgccagcggatatgcggataaccagggggcgatgcgtatctggcgcaaagattctaacggcgaggtccatctccttgccgccttcagtccatggcgtcatggtaatacttcgaccagcgagtaccgctggcaggatggccagctcgcgctgattgaactcaacgtctacggtaaaccgccggaacatattcgcgcccggtttgatgcgcagggcgaactcagctttatgcagcgtgaaatcgatgggcagaagcagcagctttccagcgatcaggtcgcgctataccgctatcgcgctgagcaaatacgccagaccagcgacgctctgcgtcagggacgcgttatgctgcgccaggggcgctggcatgccaacaggacggtgaccacctgtgaaggtcagaccgtgaagcctgacctcgatacgcaggcgctggcgcatattgagcgacgccagaatcactcatccattgaggtcagcgtggcgtggctggaagcgcctgaaggctctcagctgctgctggtggcaaacgaagatttctgcacctggcagccgaccgaaaaaagcttctgagccttaccagtggctcatccccatatgaccgcggcctccgtcgcagcttcctggtcccatacccacaccgcgagaaatacccgcctgcgctaacgcgagatcgaacttaacccgctgctgggccagctgttgaccgagaacctccatctcctgggcaatggattcgactttcgcgctatcaggcttatccgcggttaacagcgcatggtattcgtagcgttttgattgaagctgctgacgcaaaacgcgggtttgttcatagaaatcgttatgcagcttccgggcagtggcctgctgatcggcggtgagctggctgtagccctgggggcccattccgctgccgttattccagtggtgccttgcccaggctgaactgctgccgaaagtcagcgcggcgagggcaatcagcgtcagcgtcatttttttgttccgtttcatagtttattctcctggcttatggttactcaatgatttgcatcttctgtgccagaatggaaaggccgcaggatatcgggcattgagcgttttccagccggacgagagcgagtaaaaatgactcgcggtcaaggaggctgtgggtcatttttactcgatcgccttcccggtttgcgcctgagaagcggttagacgggacggaaaaatggcatgatttctgctgagcgatacggtgtctgaggaaagggagttgtcatgaacgcgatgcggttgtctaaggattccgtcgccgtctggctgagctggttgttaaccggccttatcttgctgctggtgtgcctgttctctgcgttaatcgtgcgtgattatggccgtgaaaatgaagccgcgcgccagactatccaggaaaaaggcagcgtgctgattcgcgcccttgagtccggcgcccgggtgggcatgggaatgcgtatgcatcattcccaactgcaggcgttgctggaggagatggcctggcagcctggcgtgctgtggttcgctgtgacggatgagagcggtaaaatcattgcccatagcgacccgcggcgggttggtgagtcgctctatcctgccagcactctgcgtgagctgaatattgggagcgaggagcgctggcgccggctcgaaaaaccggaaccggcgctggagatttatcgtcaatttcgcccgcttaacggcggcgggcatcatatgcgcatgatgatgcgtcgcgaagctgccgggctacgtacccaggctccccaggttatttttattgcttttgatacccgcgagctggatgccgaccatgcccgtagcctgcgtaatatggttatcatgctctgcgcggcgggcgtagtgatggcggcaacgttgctggcgcagttctggttccgccgctatcaacgttcgcgcaagcagctgcaggaggcgacggcgcgtaaagaaaagctggtggcgcttggtcatctggccgcgggcgtcgcccatgagatccgcaacccgctgtcatctataaaagggctggcaaagtattttgccgagcgaaccccagccgatggcgaagcgcatcagctggcccaggtgatggcgaaggaagccgatcgcctgaacagggtcgtcagcgagctgctggaactggtgcgtccggcgcatttaacgtatcaatcggttgatttgaatgacgtgattacgcactcgcttcagctaattagccaggatgccgccagccgggcaataacgctcgcgttcaccgcgcagcccgcgctatgccgcattcaggccgatccggatcgtttgaaacaggtgctgctgaacctttatctcaatgccgtccacgctattggccgcgatggcgtgattacggtggcggtgagggaatgcggcgacgggcgagtaaaggtgagcgttgcggacagcggcaaggggatgacggcggaacagctacaggccatttttactccgtacttcacgaccaaggccgacggcaccgggctgggcctggcggtggtgcagaacattgtcgagcagcacggtggaacgattcacgccgagagcgcccccggcgaaggcgcgctatttactctctatttgccggtcaacgggcaacaaaaggatgaacaaggatgagtggcgagcagatcgatattctggtggtggacgatgatatcagccactgcactatcttacaggcgctgttgcggggctggggataccgggttgcgctggcctacaacggtgtacaggcgctggaacaggtgcgccagacggtgtttgatctggtgctttgcgatatccgcatggccgagatggacggcatcgaaacgctgaaagagatcaaaacctggaatccgtcgattccggtattgatcatgaccgcgtactccagcgccgataccgcagtggaggcgctgaaatccggtgcgctggactaccttatcaagccgctggactttgacaagctgcagcagacgctgtctgaggcgttggcccatacgcggctgagcgagtcacccgtcgcgggtagcccccccgcggcccagtttggcatggtgggcgatagcccggcgatgcgggcgctgttgaataatattgccctggttgccccctccgatgcgacggtattaattcacggcgagtcgggcaccgggaaagagctggtcgcgcgggcgctgcacgccagcagcgcccgcagccgcaggccgctggtgatcctcaactgtgccgcactcaacgagtcgttgctggagtcggagctgtttggtcacgagaaaggcgcctttaccggcgcggacaaacggcgagaagggcgttttgttgaagcggacggcggtacgctctttctcgatgagattggcgatatttcaccgctgatgcaggtgcgcctggtgcgggcgattcaggagcgtgaagtgcagcgcgtgggcagcaatcagaccctttcggtcgatgtgcggctaattgccgccacccaccgggatttagctgaagaggtcagcgccggacgttttcgtcaggatctctactatcgcctgaacgtcgtgactatcgatatgccgccgctgcgtcagcgcaaggaagatatccctcagctggcgcgctatttcctgcagcgttatgccgagcgtaaccgcaaagcggtgcaggggtttacgccgcaggcgatggacttactgattcactacgcatggccggggaatattcgcgaactggaaaatgcggtagagcgggcggtggtcctgctgaccggagagtatatctcggaacgcgagctgccgctggcgattgccggtacgtcggtttcggacgcgccgcacggtgaggatattattcagccgctggtggaagtcgagaaagaagcgatcctggtggcgctcgaaaaaacgggcggcaacaaaactgaagccgcccgtcagctgggcattacgcgcaaaacgctgctggcaaagctcagccgttagctgttttgctcacgttcaatagcgcgccagccgatgtcgttacggctaaagctgccgtcccagcggatatcgctcatcagggcgtaagcgcgcttttgcgcttcagcgacggtgtgacccagcgcggtagcgcagagcacccggccgccgctggtcagcacgcgatcgtcatcagcgagtctggtaccggcgtggaagaccttgccgtcagccgcttcttccagcggcaggccgtggatctcatcaccggtgctgtagttgcccggatagccaccggcggcgatcacgacgcccagcgaggcgcgttcgtcccactcggaggttttctcattcagcttgccgtcgcaggcggcgaggcacagatctaccagatccgatttcatacgcagcatgatcggctgggtttccggatcgccaaagcggcagttgaactcgataaccttcgggtttccctgtttatcgatcatcaggcccgcatagaggaaaccggtgtaggtgttcccttccgctgccataccttttacggttggccagataatgcgttccatggtgcgctggtgaacctcatcggttaccaccggcgccggtgagtaagcgcccataccgcccgtgtttgggccggtatcgccattgcccacgcgtttatgatcctggctggtggccatcggcaggacgtgctcgccgtcgaccatcacgataaagctcgcctcttcgccgtcgaggaactcttcaatgacgatgcggtgtccggcgtcgccaaaggcgttacctgccagcatgtcgtgaacggcggcttccgcttcttccagcgtcatggcgacaatcacgcccttgccggcggccaggccgtcggccttgatgacgatcggcgcgcctttctcacgcaggtacgccagcgcgggctcgacttcggtgaagttctggtattccgccgtcgggatgttatgacgcgcgaggaaatctttggtgaaggctttggagccttcaagctgcgccgcgccttccgttgggccgaagattttcagccctgcggcacggaacgcatcgacaacgccaattaccagcggcgcttccgggccaacgatggtcaggtcaatcttctcgctctgcgcaaagctcagcagcgccggaatatcggtgacgccgatagccacgttctgcagcgccggttccagggcggtgcccgcgttacccggggcgacaaaaacggtatcaacctgcggtgactgtgcggctttccaggccagcgcgtgttcgcgtccgccgttgccaataactaatactttcatcgtctgctccgtgaattaatggcggaagtggcgcatgtcggtgaagatcatcgcgatgccgtgctcatcggcggcggcaatcacctcttcgtcgcgaatagagccaccgggctgaatgacgcagctcacgccaacggcagcagcggcatcaataccgtcgcggaacgggaagaaggcgtcagaggccatcgccgaacctttcacttccagaccttcatcaccggctttaatcccggcgattttggcggagtaaacgcggctcatctggcctgcgcctatcccgatggtcatattctctttggcgtacacaatggcgttggatttaacgaatttcgccactttccagcagaacagcgcatcgcgcagctcctgctcggtcggctggcgtttggaaaccacgcgcagttcgccttccgtaaccatacccagatcgcgatcctgaaccagcaggccgccgttaacgcgtttgaagtccagacccggtacgcgctgcgtccactgaccgcaggtcaggacgcggacattctgtttcgcggcagtgatcttcagggcttcttccgtcgcagacggtgcgatgatcacttcaacaaactggcgggagatgatcgcctgcgcggtttcggcatccagttcgcggttaaaggcgataatgccgccgaaggcagaggtcgggtcagttttgtacgcgcggtcgtaggcatccagaatagaggtacttaccgctacgccacatgggttggcgtgcttcacaataacgcaggccggctcgctgaattctttgacgcattccagcgcggcatcggtgtcagcgatgttgttataggagagcgctttaccctgaacctgctgtgcagtggcgacagaggcttctttgacttcttcttctatatagaaggccgcctgctggtggctgttttcaccatagcgcatatcctgcttcttaacgaagttcagattcagggtgcgcgggaagcgacccgcggcttctttgctctcgccgtgataggccggaaccatgctgccgaagtagttggcaatcatgctgtcgtaggcggcggtgtgttcgaatgccttaatggcgaggtcgaagcgggtgtcgagggtcagggagccttcgttggcatccatctctttaataatggcatcgtagtcgctgctcttcaccacgatggcgacgtctttatggttcttcgccgctgagcgaaccatggttgggccgccgatatcaatgttttctaccgcatcttccagcgagcagccctcgcgggcaacggtttgagcaaacggatacaggttaaccaccaccatatcaataggcgcgataccgtgttgttccataataccgtcatcctggccacggcgaccgagaataccgccgtgaactttcggatgcagggtcttcacgcgtccgtccatcatttccgggaaaccggtgtagtcagagacttcggtaaccggcagacctttctcagccagcaggcgtgcggtaccacccgtagacagtagctcgacaccacgagcggaaagcgcctgcgcgaattcgacgataccggccttgtcagaaacactgagcagggcgcggcggactggacgacgttgttgcatggtattaaatccccaggatttgaatattacagagagcgttaggtgaatttttgtctaaaaactcacctaacgcacccaaccgggcatccttgttatagcgcggcattgtaacgaaaacgtttgcgcaacgctcgcgaatttttatctttctctttttatcccaggatcgcgccctatagagagaagagagcgggcctttataagagggtatcggccgccacctgtggataattctgtgcgtaacagggtataaagcggggttttgctggggaatgcagcagtcagtcatttttctgcaattttactattgcggatgctcgggaactccctataatgcgcctccatcgacacggcagatgtgaatcacttcacaaacaacacggtcggttgaagagaaaaaatcctgaaataacgggttgactctgaaagaggaaagcgtaatatacgccacctcgcaacggtgagcgaaagccgcgttgcactgctctttaacaatttatcagacaatctgtgtgggcactcaaagtgacatggattcttaacgtcgcaagacgaaaaatgaataccaagtctctgagtgaacatacgtaattcattacgaagtttaattcacgagcatcaaacttaaattgaagagtttgatcatggctcagattgaacgctggcggcaggcctaacacatgcaagtcgaacggtagcacagagagcttgctctcgggtgacgagtggcggacgggtgagtaatgtctgggaaactgcctgatggagggggataactactggaaacggtagctaataccgcataacgtcgcaagaccaaagagggggaccttcgggcctcttgccatcagatgtgcccagatgggattagctagtaggtggggtaacggctcacctaggcgacgatccctagctggtctgagaggatgaccagccacactggaactgagacacggtccagactcctacgggaggcagcagtggggaatattgcacaatgggcgcaagcctgatgcagccatgccgcgtgtatgaagaaggccttcgggttgtaaagtactttcagcggggaggaaggtgttgaggttaataacctcagcaattgacgttacccgcagaagaagcaccggctaactccgtgccagcagccgcggtaatacggagggtgcaagcgttaatcggaattactgggcgtaaagcgcacgcaggcggtctgtcaagtcggatgtgaaatccccgggctcaacctgggaactgcattcgaaactggcaggctggagtcttgtagaggggggtagaattccaggtgtagcggtgaaatgcgtagagatctggaggaataccggtggcgaaggcggccccctggacaaagactgacgctcaggtgcgaaagcgtggggagcaaacaggattagataccctggtagtccacgctgtaaacgatgtcgacttggaggttgttcccttgaggagtggcttccggagctaacgcgttaagtcgaccgcctggggagtacggccgcaaggttaaaactcaaatgaattgacgggggcccgcacaagcggtggagcatgtggtttaattcgatgcaacgcgaagaaccttacctactcttgacatccagagaacttagcagagatgctttggtgccttcgggaactctgagacaggtgctgcatggctgtcgtcagctcgtgttgtgaaatgttgggttaagtcccgcaacgagcgcaacccttatcctttgttgccagcgattcggtcgggaactcaaaggagactgccagtgataaactggaggaaggtggggatgacgtcaagtcatcatggcccttacgagtagggctacacacgtgctacaatggcatatacaaagagaagcgacctcgcgagagcaagcggacctcataaagtatgtcgtagtccggattggagtctgcaactcgactccatgaagtcggaatcgctagtaatcgtggatcagaatgccacggtgaatacgttcccgggccttgtacacaccgcccgtcacaccatgggagtgggttgcaaaagaagtaggtagcttaaccttcgggagggcgcttaccactttgtgattcatgactggggtgaagtcgtaacaaggtaaccgtaggggaacctgcggttggatcacctccttaccttaaagaacctgcctttgtagtgctcacacagattgtctgatagatgtaaagaagcaagacggctgcgaagtcgcgacacctcgtgtccccttcgtctagcggttaggactccgccctttcacggcggcaacaggggttcgaatcccctaggggacgccacttgctggctgtgagtgaaaggcacaaccaaccgatatctcaaaactcatcttcgggtgacgtttgagatatttgctctttaaaaatctggatcaagctgaaaattgaaacgacacacagttaatgtgtgttcgagtctctcaaattttcgcgacacgatgatgttttacgaaacatcttcgggttgtgaggttaagcgactaagcgtacacggtggatgccctggcagtcagaggcgatgaaggacgtgctaatctgcgaaaagcgtcggtaaggtgatatgaaccgttacagccggcgatgtccgaatggggaaacccagtgcaattcgttgcactatcgttaactgaatacataggttaacgaggcgaaccgggggaactgaaacatctaagtaccccgaggaaaagaaatcaaccgagattcccccagtagcggcgagcgaacggggagcagcccggagtctgaatcagcttgtgtgttagtggaagcgtctggaaagtcgcagggtacagggtgatactcccgtacactaaaacacacaggttgtgaactcgaagagtagggcgggacacgtggtatcctgtctgaatatggggggaccatcctccaaggctaaatactcctgactgaccgatagtgaaccagtaccgtgagggaaaggcgaaaagaaccccggcgaggggagtgaaaaagaacctgaaaccgtgtacgtacaagcagtaggagcccactggttgggtgactgcgtaccttttgtataatgggtcagcgacttatattctgtagcaaggttaaccgtataggggagccgcagggaaaccgagtcttaactgggcgttaagttgcagggtatagacccgaaacccggtgatctagccatgggcaggttgaaggttgggtaacactaactggaggaccgaaccgactaatgttgaaaaattagcggatgacttgtggctgggggtgaaaggccaatcaaaccgggagatagctggttctccccgaaagctatttaggtagcgcctcgtgaactcatcttcgggggtagagcactgtttcggctagggggtcatcccgacttaccaacccgatgcaaactacgaataccgaagaatgttatcacgggagacacacggcgggtgctaacgtccgtcgtgaagagggaaacaacccagaccgccagctaaggtcccaaagtcatggttaagtgggaaacgatgtgggaaggcccagacagccaggatgttggcttagaagcagccatcatttaaagaaagcgtaatagctcactggtcgagtcggcctgcgcggaagatgtaacggggctaaaccatgcaccgaagctgcggcagcgacactatgtgttgttgggtaggggagcgttctgtaagccgttgaaggtggcctgtgagggttgctggaggtatcagaagtgcgaatgctgacataagtaacgataatgcgggtgaaaaacccgcacgccggaagaccaagggttcctgtccaacgttaatcggggcagggtgagtcgacccctaaggcgaggccgaaaggcgtagtcgatgggaaacaggttaatattcctgtactcggtgttactgcgaaggggggacggagaaggctatgttggccgggcgacggttgtcccggtttaagcatgtaggcggatgttccaggtaaatccggagcgtcactaacgctgaggtgtgatgacgaggcactacggtgctgaagtgacaaatgccctgcttccaggaaaagcctctaagcatcaggtaacatcaaatcgtaccccaaaccgacacaggtggtcaggtagagaataccaaggcgcttgagagaactcgggtgaaggaactaggcaaaatggtgccgtaacttcgggagaaggcacgctgatggtaagtgaagtgacttgctcatgaagctgaaatcagtcgaagataccagctggctgcaactgtttattaaaaacacagcactgtgcaaacacgaaagtggacgtatacggtgtgacgcctgcccggtgccggaaggttaattgatggggttatcctcgcggagaagctcttgatcgaagccccggtaaacggcggccgtaactataacggtcctaaggtagcgaaattccttgtcgggtaagttccgacctgcacgaatggcgtaatgatggccaggctgtctccacccgagactcagtgaaattgaactcgctgtgaagatgcagtgtacccgcggcaagacggaaagaccccgtgaacctttactatagcttgacactgaacactggtccttgatgtgtaggataggtgggaggctttgaagtgtggacgccagtctgcatggagccatccttgaaataccaccctttaatggctggtgttctaacgtgggcccctgatcggggttgcggacagtgtctggtgggtagtttgactggggcggtctcctcctaaagagtaacggaggagcacgaaggtcagctaatcctggtcggacatcaggaggttagtgcaatggcataagctggcttgactgcgagcgtgacggcgcgagcaggtgcgaaagcaggtcatagtgatccggtggttctgaatggaagggccatcgctcaacggataaaaggtactccggggataacaggctgataccgcccaagagttcatatcgacggcggtgtttggcacctcgatgtcggctcatcacatcctggggctgaagtaggtcccaagggtatggctgttcgccatttaaagtggtacgcgagctgggtttagaacgtcgtgagacagttcggtccctatctgccgtgggcgctggagaattgaggggggctgctcctagtacgagaggaccggagtggacgcatcactggtgttcgggttgtcatgccaatggcattgcccggtagctaaatgcggaagagataagtgctgaaagcatctaagcacgaaacttgccccgagatgagttctccctgaccctttaagggtcctgaaggaacgttgaagacgacgacgttgataggccgggtgtgtaagcgcagcgatgcgttgagctaaccggtactaatgaaccgtgaggcttaaccttacaacgccgaagatgttttggcgatttgagaagacaacaatttcagcattgattacagattttcgggaacgaaagattttacgctgaggcaaggcggcaaatgaagtaaaggaaggagcatactgtagtatgtgactgactttacgaatgcagccaacgcagcatcggtgtaaaagattcgtttctgacaacagaatttgcctggcggcactagcgcggtggtcccacctgaccccatgccgaactcagaagtgaaacgccgtagcgccgatggtagtgtggggtctccccatgtgagagtagggaactgccaggcatcaaacaagtgaagagcccatcctgacggatgggctttttgcgtttttgtcgtctgaaccgaccggacatcggttatccttatccagtcttacttcattactcatgtaccaaattcaataacggatagggtttgccaagatcgtccgtctcagaacggcctgtcaccttaaagcccatcttcttataaaatccgaccgcttgttcattctgctcattaacgttggtcgtcagtttgggcgctaacgtcagcgcgtgttcaatcaacagcttacccacgccgcagccgcggaccgtagggtcaacgaatagcgcatccatatgttcccccgtaagtagcataaaggcgaccggctcgtctttctccgtcaccgcgacccacagcggcgcttcgggtaaaaacgcgctcaccagatcttccagttccgctctatactcttttgataaaaaatcgtgcgttgcatcgaccgaccgacgccagatcgcaatcagttttttcccttcatcatgccgtgaacggcggatactaataaccatatttgctccttttctttgttcttatattctaactcaaatgtctccgtgaaattttctcaccctgcacctgcaggctcgacattcaccttattcctgggtatcttcagctgtctggatgtctaaacgtttatacgtatgctatgaggtaataaagttatgccaattcgggtgcaggacgagctaccggccgtcaatttcttgcgtaatgaaaacgtctttgtgatgacgacaactcgcgcgacgactcaggaaatccgcccgctgaaggtgctcatccttaatctgatgccgaagaaaatcgagactgagaatcagtttttgcgactgctttccaactctcctctgcagcttgatatccagctgctgcgcatcgatgcccgcgaatcacgtaatacgccggcggaacacctgaacaacttctactgcaactttgaagatatttgcgatcagaactttgatggcctgattgttaccggtgcgcctttaggtttggttgaatttaatgacgttgcctactggccgcagataaaacaggtgctggaatgggctaaagatcatgttacctcaacgctgtttgtctgttgggcggtacaggcagccctcaatatcctctacggtatccctaaacagacccgctctgagaagatttccggggtctacgaacaccatatcgtgcaacctcatgccttgttaacccgcggctttgacgatagctttctggccccgcactcgcgctatgccgatttcccggcggcgctgatacgcgactacaccgacctcgagatcctggcggaaacagaagagggcgacgcctacctgttcgccagcaaagataagcgcatcgccttcgtgaccggtcacccggaatatgacgcgaacaccctggccagcgaattcttccgcgatgtggaagcgggtctcgatccgcaggttccacataattatttcccgcagaacgatccgcagaacaaaccgcgcgccacctggcgaagccatggcaatttgctgtttatcaactggctgaattattacgtctaccagatcacgccatacgatctacgccatatgaatccgactctggattaatcttctacacaacgcgatcctaaagcgtttcagcattttgcctctggcaccttcgggtgccttttttatttccgaaatgcagctcatattgtaattaaactttatttatattgttatcaataggttaaatgataattaaattaaaaatggaaattgtttttgattttgaaaaataaatgcgtagtcttaattgtgctgaacgaaaactacacaacgatcttacgttcgcgccaactggatcaaccaagaggagcagcacatgacgcagcaggcgacaatcactgacgaactggcttttagccagccatatggcgaccaggagaagcaaatcttaacgcctgaggccgtagaatttctgaccgagctggtgcgccgctttacgcctgagcgcaataaactcctggccgcgcgtatccagcagcagcaggcaattgataacggcaagcttcccgattttatttcggaaacggattccattcgtagcggtgattggaagatccgcggcattccggacgatttgcaggatcggcgggtagaaattaccggtccggtagagcgcaagatggtcatcaatgcgctcaatgcgaatgtaaaagtctttatggcggatttcgaagactcactggcgcccgaatggagcaaagtcattgatgggcaaattaacctgcgcgatgcggttaacggcaccatcagctacaccaatgaagccggcaagatttatcagctgaagccgaacccggcgctgctgatctgccgcgtgcgcggtctgcatctgccggaaaaacacgtgacgtggcgcagggaagcgattcccggcagtctgttcgacttcgccctctatttcttccacaactacaaagcgttactggaaaaaggcagcggcccctatttctatctgccgaagactcaggcctggcaggaagccgcgtggtggagtgaagtatttagctttacggaagaccgttttgagctgccgcgcggcaccatcaaagccacgctgctgatcgaaacgctgcccgccgtattccagatggacgaaattctgcacgccctgcgcgaccatattgtgggtctgaactgcgggcgctgggactacatcttcagctatatcaaaacgctgaagaatcatccggatcgcgttctgccggaccgtcaggtggtgacgatggacaagcctttcctcagcgcctactcgcgattgttgattaagacctgccacaggcgcggcgcgtttgcgatgggcggcatggcggcctttattccgagcaaagatgccgagcgaaacaaccaggtgctgaacaaggtaaaagcggacaaatcgctggaggcgaataacggtcatgacggtacctggatcgcgcatcccgggctggctgacaccgcgatggccgtctttaacggcgtactgggcgagaacaaaaatcagctgtccgttacccgcgaagacgatgcgccgattaccgctgaacagctgttggctccctgcgagggcgaacgaaccgaagagggcatgcgcgccaacattcgcgtggcggtgcagtacatcgaggcgtggatttccggcaacggctgcgtaccgatttatggcctgatggaagatgcggcgacggcggaaatctcccgtacctctatctggcaatggatccaccatgagaaaaccctcagtaacggcacaccggtcaccaaagcgctgttccgccagtggctggccgaagagatgcgggtgattcaggacgaactgggcgagcaccgctacagcagcgggcgttttgatgaagccgctcgcctgatggaacagatcaccacctccgacgagctgattgatttcttaaccctgccgggctaccgccttctggcctaattcaccacacaacaatatggagcatctgcacatgaaaacccgtacccaacaaatcgaagaattaaacaaagagtggacgaatccgcgctgggaaggcattactcgcccatacagcgccgaagatgtggtgaagctgcgcggctcggtcaacccggaatgtactctggcgcagctgggcgcggcaaagatgtggcgactgctgcacggggaagcgaaaaaaggctacgtcaacagcttgggcgcgctgaccggcggtcaggcgctgcagcaggcgaaagcgggcattgaagcgatttatctttccggctggcaggtcgcagcggacgccaacctggcctccagcatgtatccggatcaatcgctctatccggcgaactcggtaccggccgtggtcgatcggatcaacaacagcttccgccgcgcggatcagatccagtggtctgcgggcattgagccgaacgatccgcgttataccgattatttcctgccgatcgtcgccgatgcggaagcggggtttggcggcgtgcttaatgcgtttgagctgatgaaatcgatgattgaggccggtgcagcggccgtacacttcgaagaccagctggcatcggtgaaaaaatgcggccatatgggcggcaaagtgctggttcccacgcaagaggcgattcagaaactggtcgccgcgcgtctggcggcggacgtcatgggcgtgccgacgctggtgatcgctcgcactgacgccgatgcggcggatttaattacctcagactgcgatccttacgatcgccagttcattaccggcgaccgtaccagcgaaggtttcttccgtacccatgccggtatcgaacaggccatcagccgcgggctggcctacgcgccctatgccgacctggtgtggtgtgagacctctaccccggaccttgagctggcgaagcgctttgccgacgcgatccacgcgaaatatccgggcaaactgctggcctacaactgctcgccgtcgtttaactggcagaaaaagctggatgataaaaccattgccagcttccagcagcagctgtcggatatgggctacaagtatcagttcatcaccctggccggtattcacagcatgtggttcaacatgttcgacctggcccacgcctacgcccagggcgaggggatgaagcactacgttgagaaggtccagcagccggagttcgcggcggctaaagatggctacacctttgtctctcatcagcaggaggtcggcaccggatacttcgataaggtcaccaccattatccagggcggagcctcatcagtcacggcgttaaccggctctacagaagaagatcagttctgataatttccccctctccctctctccgggggagagggatgggtgagggggaagagatgacgcgtggcctggaattattgattgctcaaactattttgcagggttttgacgcccagtacggtcgttttcttgaagtgacttccggcgcccagcagcgctttgaacaggctgactggcatgccgtccagcaggcgatgaagcagcgtattcatctctacgatcaccatgtcggcctggtcgtcgagcagctgcgctgcattaccgatggtaaaaataccgataccgattttttgctgcgggtaaaagaacactatacccacctgctgccggattaccctcgtttcgaaattgcggagagctttttcaattccgtttattgccggttgtttgaccaccgctcgctgacttccgagcggctttttattttcagctctcagccagagcggcgcttacgcgccatcccgcgcccgctggccaaagatttcttccccgagcgcggctgggacacgctattacgcaaagtgttatccgatcttcctctccgtctgccgtggcaaaacagcgcgcgcgatatcggttatatcaccgcttgcctgcaggaggcgctcggcagcgagctgctttcccgctcgtacctgcaggtggcgaatgaactgttttaccgcaataaggcggcctggctggtaggcaaactggttacgccgatggcgacgctgccttttcttctgccaatccatcgcaccgatgaaggcgaattgtttgtcgatgcctgtctgacgatgcatgccgaagccagcatcgtttttggcttcgcccgctcctattttatggtttacgcgccgctacccggcgcgctggtcgagtggctgcgcgagattctcccggggaaaaccaccgctgaactgtacatggcgattggctgccagaagcatgcgaaaaccgagagctatcgggaatacctgcactatatttcccgcagcgatgagcaatttattgaagcgccggggattcgcggcatggtgatgctggtgtttactttgccgggatttgatcgggtatttaaagtcattaaggaccgctttgcgccacagaaagagatgaccgccgcccacgtgcgcgcctgctatcagctggtcaaagagcacgaccgcgtgggaaggatggccgatacccaggagtttgagaacttcgtcctggagaaacggcaaattgcgcccgaacttatggccctgttacaaaccgaagccggagcgaaaattaccgatctcggcgatcggattgcgatcagccatctttatatcgagcggcggatggtgccgctgaatatctggctggagcaggtggacggtccggcgctgcgcgatgcggtagaggagtacggcaacgccattcgtcagctggccgccgccaacattttccccggcgatatgctatttaaaaactttggcgtcacgcgtcacggccgggtggtgttctacgattacgatgaaatttgctatatgacggaggtgaatttccgcgagatcccgccggcgcgctacccggaggatgaactcgccagcgagccctggtatagcgtctcgcctggcgatgtttttccggaagagtttcgccactggctgtgcgctgacccgcgcatcggaccgctatttgaagagatgcacgccgacctgctgcgcgccgactactggcgggagctgcaaacgcgtatccgcaacggccacgtggaagacgtctacgcctatcgccgccgtcagcgttttagcgtgcgctacggcgacctgaagcaggcgggatagccgatggcctgcttcaggctgcttcgataacggcaaattcttcgtacaccagctccatatccggcgcccaggtgccttcgcgttcaaagaatgcctgatgcgccgattgccagtaagcgaggctcaaatcaccttcgccctccagcgcggcgagctcagggctcatttcgttaaaacgaatgagcctgagggtcagggtgcgtatcacgcagacggctttccctttgccgtccagcacaatgtgatacgcccccggcgtcacgggcggctgctcctgctgatagctggtaagcgagccgcaggtgccgcgcttcttcccggcgataaccagggcagccagctcgtcggccagcgccggtgaatcgccgaaagaccagcagaaagcagaagggtatttatcctgccagtaggatttcagatcgctcatttagcgcactccgccgtaggccagcgtcacttctttcgccgctttaatcaccatcgcgccgaactcggtcacgcggtcatcggtaatacgggaaatgggcccggaaatggagatggcggcgaacggctcacgatgttcatcataaatgcacgacgctacgcagcgcaggcccagcgcgtgttcttcgtcatcaaacgagtagccgcgcttacgcgtctgggccaggtcctctttcagatgtaccggcgataccagggtggcatgggtataagcgtgcagaccttgacggtgcagcaggccggtaacctgctcttcgcttagctgcgacagaaacgcctttccggcgccggaagcgtgcatcggcagcttaccgccaatcggtgccgacatacgcatcagctgcgtacactgcacctgatcgataataatcgcctgatgatcgctctggtcaagcaccgcgaggttaaccgtttcaccggaatcttccatcagctgacgcaaaatcggatggacgatcgccaacagattacggctttgcaggaagctgctgccgacgacgaaagcatgggcgcccaccgaccagtggcccagctcaccgacctgacgaacaaaacccagctgctgcatggtcgtcagcaggcggtgagtcgtggagttaggcaggccggcctgctgggccagttcggtcagcgccacgctgccgtgggattcagcaatccattcgagcagcttcagtccgcgggtcagggactgaacttgcccgccggccggagcggcggcgggggaggcaggttttctgccgcgttttgcgggagcgggggtcgccatcgcgaactccttttttctgtatcgtggaaatgattttcgttttatttggcgataatgcaatcactacccgactgatcggatgagtgaagctgaacatgtctcatcttgcccgctgttctcttttccaccccttcggtttgtgccagtatggtctgttgagttttttcggtctggttgagcgttgtcgggagcgagtgtgagcagcaaagttgagcaactgcatcagcagttaaaagcacgtattttggttctggatgggggcatgggcaccatgatccagagctatcgtctgagtgagcaggactttcgcggcgagcgctttgccgactggccgtgcgacctgaagggcaacaacgacctgctggttctcagcaagccggatgtgataaccgctatccacgatgcctattttgcggccggggcggatatcattgaaaccaacacctttaactcgacgaccatcgcgatggcggattaccagatggaatccctgtcggcggaaatcaactttgtggcggcgaaactggcccgcgccagcgccgatgcctggaccgcacgcacgccggaaaaaccgcgctacgtcgcaggggtcctcggcccgactaaccgcacggcgtccatttctcccgacgtcaacgacccggccttccgcaatatcacctttgacgggctggtggaagcctatcgtgaatccaccaaagcgctggtggaaggcggggcggatctgattctgattgagacggtgttcgataccctcaacgccaaagcggcgatctttgcggttaaagaggagtttgaagcgctgggggtcgatctgccgattatgatctccggcaccatcaccgacgcctccgggcgcacgctgtccggccagaccaccgaagccttttataactcgctgcgccacgccgatgcgctgacgtttggcctcaactgcgccctggggccggatgagctgcgccagtacgtgcaggagctgtcgcgtatcgccgaatgctacgttaccgcccacccgaacgccggtctgccgaacgcctttggcgaatacgacctcgacgccgacacgatggcggcgcaaattcgcgaatgggctgaagccggattcctgaatattgtcggcggctgctgcggtaccacgccggaacatatcgccgccatgagccgcgcggtggccggcctgccgccgcgccagctgccggaaatccccgtcgcctgtcgtctttccggccttgagccgctgaatatcggcgatgacagcctgtttgtgaacgtcggcgaacgcaccaacgttaccggctcggcgaaattcaagcgcctgattaaagaagaaaaatataacgaagcgctggatgtggcgcgccagcaggtggaaagcggcgcgcagattatcgatatcaatatggatgaggggatgctcgacgccgaagcggcaatgacgcgtttcctcaacctgatcgccggtgagccggatatcgcccgcgtgccgattatgatcgactcctccaaatgggaggtcatcgaaaagggcctgaagtgtattcagggtaaaggcatcgttaactccatctcgatgaaagagggcgttgagccgtttatccagcatgcgaaaaaggtgcgccgctacggggccgccgtcgtggtgatggcctttgatgaagtgggccaggccgatacccgcgagcggaaaattgaaatttgccgccgggcgtacaaaattctcaccgaagaggtgggcttcccgccggaagatatcatctttgacccgaatattttcgccgtggcgaccgggattgaagagcacaacaactatgcccaggactttatcggcgcctgcgaagatatcaaacgcgaactgccgcacgcgctgatctccggcggcgtctctaacgtgtcgttctccttccgcggcaacgacccggtgcgcgaggcgattcacgcggtattcctctactacgccatccgcaacggcatggacatgggcatcgttaacgccggccagctggcgatttacgacgaccttcccgccgagctgcgcgatgcggttgaagatgtgattctgaaccgccgcgatgacggcactgaacgtctgctcgatctggcggaaaagtatcgcggcagcaaaaccgacgataccgctaacgctcagcaggcggaatggcgcagctgggacgtcaaaaaacgcctcgaatactcgctggttaaaggcattaccgaatttatcgagctcgataccgaagaagcccgccagcaggccgcgcgtccgattgaggttatcgaagggccgctgatggacggcatgaacgtggtcggcgacctgttcggtgaagggaaaatgttcctgccgcaggtggtgaaatccgcccgcgtcatgaagcaggcggtggcctacctcgaaccttatattgaggccagcaaagagaaaggttccagcaacggcaagatggtcatcgccaccgtgaagggtgacgttcacgacatcggcaagaatattgtcggcgtggtgctgcagtgtaacaactacgaaatcgtcgaccttggcgtgatggtgcctgcggataaaatcctgaaaaccgcccgcgaggttaacgccgacctgattggcctctccgggctgattacgccgtcgctggatgagatggtcaacgtggcgaaggagatggagcgtcagggctttactattccgctgctgattggcggcgcaaccacctcgaaagcgcacacggcggtgaaaatcgagcagaactacagcgggccgacggtctatgtgcagaacgcctcgcgcaccgttggcgtggtcgctgcgctgctgtccgatagccagcgcgatgattttgtcgcccgtacccgcaaagagtacgaaacggtacgtattcagcacgggcgtaaaaagccgcgcaccccgccggtcacgctggaggccgcgcgcgataacgacctggcctttgactgggcaagctacaccccgccggtggcccatcgtctgggcgtgcatgaggttgaggccagtatcgaaaccctgcgtaactatatcgactggacgccgttctttatgacctggtcgctggccggtaagtatccgcgcattctggaagatgaagtggtcggcgaagaggcgcagcgcctgtttaaagacgccaacgaactgctggataagctcagcgccgggaaggccctgaatccgcgcggcgtggtggggctgttcccggctaaccgcgtcggcgacgatgttgaaatctatcgcgatgaaacccggactcacgtgctgacggtggggcatcatctgcgccagcagaccgagaaagtcggctttgccaactactgcctggcggattttgtcgcgccgaagctgtcagggaaggcggactatatcggcgcctttgcggtgaccggcggccttgaggaagacgcgctggccgacgcctacgaagcgcagcacgatgactacaacaagattatggtgaaggcgattgctgaccgcctggcggaagcctttgccgagtatctgcatgagcgggtgcgtaaggtttactggggctatgcggcgaacgaaaacctcagcaacgaggagctgatccgcgagaactaccagggaattcgcccggcgccgggctatccggcctgcccggagcacaccgaaaaggcgacgatctgggaactgctggaggtggaaaaacgcaccggcatgaagctgacggaatcttttgccatgtggcccggcgcgtcggtttccggctggtacttcagccatccggacagcaaatacttcgcggtagcgcaaattcagcgcgaccaggtggaagactatgcgttgcgtaaggggatgagcatagcggaagtggagcgctggctggcgccgaacctcggttacgatgccgactgatccaccaaaccgttatctttccttacaactaacagggcgctcaacgagcgccctgtctctttattgtgcgtaaacccttatactgaaggaagcttgcgatcgttgccgtcggataagcgaagcgctatccgtcctgtaacggtttatgagtttcgggaacgaataaatataaggagaagctgattccgtgttaactctgctacacctgttgtccgccgtcgccctactggtgtggggcacccatatcgtccgtaccggcgtaatgcgcgtctacggcgctcgtctgcgaagcgtactcagcagcagcgtggagaaaaaaccgctcgccttctgcgcggggatcggcgttaccgcgctggtgcagagcagtaacgccaccaccatgctggtcacctcttttgtcgcccaggatctggtggcgctggcccctgcgctggtgatggtgctgggcgctgacgtcggtaccgcgctgatggcgagggtgctgaccttcgatctgtcctggctttcgccgctgctgatttttatcggcgtgattttcttccttgggcgcaagcaaacgcgcgcgggccagctcgggcgcgtggggattggtctgggcttgattctgctggcgctggagctgatcgttcaggcggtgcatcccattacccaggctaatggcgtgcaggtgatttttgcctcgttgaccggcgatattatgctggatgcgctgatcggcgcggtgtttgccatcatcagctattcaagcctggcagcggtgctgctgaccgcaacgttaaccgccaccggcgtgatttcgtttccggtggcgctgtgcctggtgatcggcgccaacctcggatccgggctgctggccatgctaaacaacagcggcgctaatgccgccgcccgccgcgtggcgctcggcagcctgctgtttaagctggtgggtagcctgattatcctgccgtttgtgcatctgttggcaaacgtcatggatgagcttccgctgcaaaaatccgaactggttatctatttccacgtcttctacaacctgatccgctgtatcgccatggtgccgtttgccggccccatggctaacctctgtaagcgtctgattcgcgatgagcccgagctggacgcgcggctgaagccgaagcatcttgatacttcggcgctggatacgcccgccctggcgctggccaatgctgcccgcgaaaccctgcgtattggcgatgccatggagcagatgctggaaagcctgcataaagtgatgcacggcgagccgcgtgaggagaaagagctgcggcggatggcggacgatatcaacgtactttacaccgccattaagctctatctggcgcggatgccgaaagaggagctggcggatgaggagtcccgccgctgggcggaaattatcgaaatggcgcttaacctcgagcaggcttcggatatcgtcgaaagaatgggcagcgagatcgccgataaatcgctggccgcgcggcgcgcgttctccatggagggattaaaagagctggatgccctctacgagcagctgctcagcaatctgcagctggcgatgtcggtcttcttctccggcgacgtgccgagcgcccgccgcctgcgccgcagcaagcatcgttttcgtatcatgaaccgtcgttactcgcatgcccacgttgaccgcctgcatcagcaaaacgtgcagagtattgagaccagtacgctgcacctggcgctgctgggcgatatgaagcgtctgaattcactgttctgctcggtggcctatagcgtgatggagcagccggatgaggacgatgagcgcgatgagtattaagcgctgatgtgccgccagacatccccggctcgcgctgcgcttagccgggctacaggtataccgctgtctgcgggatggtagtccggctaagcgcagcatcgcctccggggaattatgccgctctgcgctttgctcccgggggcggcgcaagcgccttgcccgggctacgagttctccaccgtctgcgggatggtagcccggacagatgcgcagcatcgcctccggggaattatgccactctgcgctttgctcccgggggcggcgcaagcgccttgcccgggctacgagttctccaccgtctgcgggatggtagcccggacaggcgcgcagcgccgcctccgggaaacgtgcgcacggggtttagaaacgatgaccggcgttgagggtcaccgcgtcttctccggctctgaataccagcgttggattcgggccgccaagggtagcgtggccctgcgtcacctgtatccagttgccttccggcaggccgataatcgtcagctccggcgcaaccaccagcagctcgcggatccgctgttcgcgggtctcgcctttatggccttccggcagcgcgttggtgaaatgcgggttaatttgcagcgggaacagccccagcgcagcaaaaccgttagggtcgacaatcggcatatcgttagtggtgcgaatcgtcgggcaggccaggttagcgcccgcgctccagccgatatacagcgccccgcgcttcaccacatccaccatcggcgccagcaggccgcgttcgcggcactctttcagcaactgaaaggtattgccgccgccgacgataactatctccgcattctcaatcgccgacaccgggtccgcgacgctgtgaataccggtaaccgtaacgcccattgggctgaagacggcggcggttttcgcggtgtaatcatcccaggtttgcgtcaccccggcaaaagggatgaataccgcagaacggcggccatttagctgcccggcaatggtcggcagcgcatgttccagccaggctttgcccggcagcgttgagttactcaatagcagcagttccattatttctccatttgaccagatgattattcgggcagagatattatcacaggatatctcaccgcttgctgacgtggctcacgctgggacgcgctgagcaaagcggaacggtgattattggcgcagcgactctctgaattaatctggaaagcgcctcgcagactgactctaccgggcgtgacaggttagcgggaaccgcttagttttacgttgatgattcacaggcaaaggaatagaaaatgctcgtttattacgctaatctgaggcatgtcatgcgcattaccatgggggctatcatgcgcactacgtcgaacgttaaaaaatcagtcaatgtctcgctttcgcctgaaatcctggaagaggcgcgtaagcttaaaatcaacatttcggcggttttaacggaagctttacttgagaaatttcgtgagcacaaacgtgaagagtggttacgagacaataagaaatcgatcgatacgattaaccaatgggtagaagaaaacggttcgtttagtgattttcaaaggccgttctgatggaacaatattgcgcttatgagaatacgggaagcggtaaaaaggttttcccttatttaatcaacctgcagcatccggtcgcgaatgtcctgaagcatatcctggttgcccctgtgatagaacaaaaccaactacctgatacccagcctccgaccaaaatttgtcccgtgattacgattgccggtcaaacttatattgtgatgacgcatatgatggcgggtttaccgcagaaagaactgggcaagcgggttgctgatttgacggcggacagggctgcgctgcgcgatgcaatcgcctttctgatcaacggttattagagcgccctccctggcgctctccgttttgcccttatcctctggcaaaggccgcggcttcagcgaccagcgccgcgtccggacgcacgccggtgtagagcgcaaactgctccaccgcctgcagggcaatcacctccgcgccgctgataacgcgcttgtccagcctctgcgccagcttgatgagcggggtttccggcggcagagcgaccacgtcaaatatcacgtcggcccgttccaccatcgtcgggctaaaggccagggtttcgctttccgcgccgcccgccatgccgagcggcgtgacgttaaccagaatatccgccgcgattccctccggcctgggctgccactgaaaaccgtactgctttgccagcgccaggccgcgctcgcgatggcgggcggcgataatcacatcgcggaaaccggcatcgcggaaggcggcgatgaccgctttgcccattccgccgctgccctggatcatcactttggctgaggaatcgagctgatagctgtcaatcaggcttttcaccgcgatatagtcggtattcagcccggtcagcctgccgtcgtcgttgacgatggtgttgaccgaatcaatcgcctttgccgaagggtcaagcgcgtcaagatacgctatgcagctctctttaaacggcattgagaccgcgcagccgcgaatgcctaatgcgcgcacgccgtttaccgccgcggctatatcctgggtcgtaaacgctttatagatatagttcagccccagcttttcatacaggtagttatgaaagcgggtgccgaagttacccgggcgaccggccagcgacatgcacagccgcgtatcgcgatcaatcatgagcaatatcctccgcgtgcgccagcagatactcttccgcctcttttgaccagataccgtggtgacgttccataatcgccgccagctgcgggtcgctaatgtttcccagcggcgtaagcggaatgttttttccggtataaaccagcttcttaccgccgcctaacgccggtaaatccagggtggtctcgcccgccgcgttcagccccagaatatgagtcaccaccttcgcggtctgcacctttttctcctgcatcagcgctacggcggcgcgcatatcatcggtattgccgccggaggtgcccacgtagtgggtgaaggcgtaatgcacatcgtaaaaattgatcggtgcgctgaactgcttatcctgtgggccggcgaaaaagttcaggcagccgtccggggccagcagcgaggatgccagggtgatgagctgttcgttagggacgaagacgaagatatcgtcaaagccgtggccgccggagagcgccatcagcgtttcgcggctggcgtcgcgcccatccagatagtgaatcaacgtttgcggctcggagggatagtgctggcgcgcatagctgagctttggcttattggtatcggtgaccaccagcagcgccgggttgatcgggccatgcagcgcgtagtcgatagccagtagccccatcgggccggtgccgccgaggatcagggtgcggccctgcgggcgaatgcccatcacatggttatagctgccttcctgcagatgatagttggcgttgaaggcgccaattacgcaggaaagcggctccaccagcgagccttcaaaccaggtatcgccttcccaggaaagtaaacaatcctgttccatcacctcgttggggatcaccacgtgggtggcttcgccgccgatccatggaaaagaataaccggggcagtccgggcgatccggcagctgcaggttggcctgaatcacatagcgctggccggcgtgaaacttgtgctgccactttttgccgacggcgataatctccccgcagaactcatggccgataatgattgggttcgtcgccacatcgtcaggcacctttttgtggtcctcgccctggttcgcctctttccacgaggagaggcacaggctgtcggtgaccacccgggcgaggatttcatcatcctgcatcgccgggagttcgaaggtttccaggcgcaggtcgcgtttgccgtacaggcgcagggctgttgttgtttgcatgtttaccacctcatccccttcatctttcgcatgacggctgcgaaatcttttgggtctaacttgttgaagtagccccggcatcgccggggcggaaaaatcaggacaggaagcccagcgcgttaccgataatccccaaaccgaagagggcgaaaatcagccataccgggttcactttcttattgagcaggcgcaccatcagcagcgtcaggcccagagccagcaggccggggcagagctgatcgaggatgtcctgtacggtcatggtgacggtcgagccgtcggcgcccggggtttgcgagaccaccagcgggacgttgatggtggtccacttggtcaccagcacgcccatcacaaacaggccaagaatggaggcgccttcggtcagtttttgcagcaggttgccgcccatatcgctgacgatattgacccctttacggaagccgagctgcagcccgtaccacttcatcgccagacgtaccgcgttgaaaataaagaagaacagcagcggtccaagaatattgccggagagcgccagcgaggcgccgagggcggcggtaatcggccgcagcgtgccccataccagcgggtcgcccacgcctgccagcggccccatcaggccaactttgatcccgttgatggcgccatcgtcgatagcggcgccgttggcccgggcttcctccatcgcggcggtgacgccaatcaccggcccgcagactgccggagtggtgttgaagaacaccagatggcgcttcagcgcggcgacctgatcctccttcagcgggtagaggcgcttgatggccgggatcatgtcgtagcagaagccaagcccgtgaatacgttcgaagttgaatgacgcctgctgcaggttggagcgcagaaacatgctcaccaggtcgccttgggtaatttttctctgttccatgttgggctccatcagtcgtcaagctggtcaagggcagtggaagaggtggcggcggcctgcggttcgggtttacgccactgcggattaagctggatataaatcagcgcgatgatgaccccgacgccgccgaaggccagcaggctaaagtcgaggtagccgcccgcgaggaagccgaggaagaagaagggcatcagatacttcacgcccatcatgcgcagcaccatggcgtagccgaccaccacgataaaaccgccggcgatttgcagaccgcgggtgacgaagtccggaatggcgttgagcatattgctgaccatatccgcgctgacaaacagagaaacgatgagtgcgggaatggcgacgcgcagcgcctgaacgcccagcgccgacacgtgcagcagatcgattgttctgaagcgcgcctcttccgcggccttatccgccgcgtgctggaacaccacggtaatggtgcgggcgaacacggtgagcacctgacctgcggcagcgaccggcagcgcaatcgctattccggtagcgatactttgctggcccacgatcaccaggatggcggagataatgctggctaacgccgaatccggagactgcgccgcgccgacgttcatccagccgagcgcgatcagctccagcgtcccgccgagcataatcccggtttttagatcgccgagaattaagccaatcacggtacaggcgattaatgggcggtgcgtctggaattcatccagcacgctgcccatcccggcaatacaggaaaaaataaatatggcgattatttgtagggtacttatttccataatttgtcaccttgagggtatagaaatccctgccttttacggcatttacacgatgttcttcaggctgcctctttgttgactgcattctctcgccccagtcgcatagttagctatgctgctggtgactcgctcatttgccgccgcgatacatccagaatgacagtgtgtaataaaaggcgcgttttattattctgtaacggactgctctgctattttatcgagaatattaaccgacggatctgaagccacgacgcgtaaatcaagcttaacgcccagagtatctaactgctgaaaggcattaatatccgttgcgtctaatgacaccgctttggttaactgttttttacccggtcgccaggccatgccgccaatattcagcgtggctattttgacgccctgctgcaccatggttaatacgtcctgcggattagtgaataaataaaaaaccgtttcgtcctgatattgcgggttgtgataaacggcgacggctttctcaatattcaccacattgaccttcatgcccggcggcgcggcctggcgaagcagcgtgcggcgaacgtcgtcgttatacacgtcgtcattacagataatgatgcgctgggcgttggccacttttgaccaaacggtggtgacttggccgtgaatcaggcggtcatcaatgcgtgcgagcgtaatgttcatcagaaatcctcctcaacggtttccggctgccgccaggtgacgcagcactggctggcgatggtctcaagatgttggcacagtgcttctgcattcatcgtttgctggttatcgaccagctccagagccagcggtagcgacaggccgctgatgacccgaagctgcgggttgcgcatcgccaggccggcggcggcgttccacgggctgccgcactgtagatcgacggcgatgagccactcctcctctttgtgagtacttaccaacttttcaagcttatcggcgatatcgcccgcgttttcccccggtacaaacgccacggcgctgacgtggacatcgccgtaaaccatgcgcaccgagtcgagcatggcgcaggccagctgaccgtgagcgcagaagatgacgttaaccatgtttcccccttagccgcgcgttttgccgcccgcaatgttagtggttactccggtaatgtagctggcgcgctctgagagcagatagcaaacaaaatcagcaacttcgctgagacggccggagcgaccaacaggaatcgcatttttgctatagccttcgcgcagctgttcgacggtgatattgcgggtccaggccagcgcttcttcatattccggcgtacgcagcccggttttttccagaatgcccggcgcgacgcctacgacgcgaataccgtgcttgcccagctctttcgaccaggagcgggtaaagctgttcagcgcggctttggtcgcggcgtagcagctctggccttcagagccttcgagaccgctttccgacgagacgttaacaatcacgccgctgcgctgtttaaccatctggcgcgccaccgcctgcgacatcaggaacacgcctttctggttgatattgaccattttttcgaatgccgcttcatttaattcatagcgaccggacggcgctttctcatccactaataaacgcgggaagttgacgccggcgttattgactaaaccatcaatgcggccaaagcgctgaataatactctcgacggttttattcacttcgctggcgctggaaatatcggttggccagaaattataattatcgcgattctgatgtttgtcgccgccgtgaatatcgctcatctgcacgtttgcgccctgggataataactcatcgacaatcgccaggccgattcctgatgcgccgccggtcacgataattattttgtcttttaaatttaaccatgtattcattatcgactcctgtttctttagataaagggatcccccgcagcagcgctgcgtgaaatcatattcttgacatttacttcagtaatgactcagcggtttctcgattcgtcaccagacaattaatgtaatgaccgtttaaggcgccaagaatcccggcgtatttctcctcgcccatggcgatacccaccgagtagcgcgcctgcttgagtttcgccatctcgatagagagcgttttttcgctcatggcggtttcgaccagcgcgccatcaatgttgtaaaaacgcgaacagatatcgccggcgacctggcgagcgttgagatcgtcgctctcttcactgccgtaaaatgcatgccagttggcgccgtcgcggatcgccggagaaccaatgcccaccagcgcgacgtccaggttatcccagtaggaggcaatcgttttaaaatgccgggactgcataataccgttgcgaattaatgtgttatccagcagtgccgggaaatcagcgagatgagattccgctttcagcttcgccgctgcgccgtaggtcagcgtattcacgtggtaacgactttccagttttccggaggggccgccgataatcggcacgcagataacctgacgggactggctggcctgcggcagattctccaccagcgcgcgcaccgcccgaccccaggagaagccgacgatatcgcccggctccagcagcctgtcgaccaattgcgcgccatgcaggccgataagattgagctgatcctcctccagcagtgagtcgcaggccgccaccaccgcctctttgagaccgaatttttgttttagctgctgctcaagccacagattttcgttgtagtcgtagttgatggcgatagtgacgatgccctgctcgcggccgcgcttcagcagacggctgatagtggtgcggtatatccccagctcgcgggcaatctgcgcctgggtcatatcctgctcatagtagagctgggcgattttcacgatcagacgaatatcgtcgctgttttccatcgtcactgtcggctcctgcacatttgtgcaaatgggagagttgctgtcatgatctgatataaccccatcagcgacccgcttcaaagaaattttcctctatttcatgaggatgttccgaccgtttctgttgcacatttgcgttgcttaccggtggtttatggcacctttgtgccggacgtgataagagcctgattctgctttgtttcgccgggcaaagttgccgggctttcatgggcacacttttgtgttgaaaggcggagcagatcacatttagcggcaggcgacgagagcgcgattcttttttatcgcccgcaaggtagggtatatttcgcttttacaggagattttatgctgcccgactcatcaacccgactcaataaatacatcagcgaaagcggaatttgctcgcgtcgtgaagccgatcgctttatcgaacaaggcaacgtttttatcaacggcaagcgcgctaccatcggcgaccaggttaaagcgggcgacgtggtaaaggtcaatggccggttgattgagccgcgcgaagcggacgatctggtcctgattgcgctgaataaaccggttggcatcgtcagcaccaccgaagacggcgagcgcgacaatattgtggatttcgttaaccacagtaaacgcgttttccccatcggtcgcctggataaagactcccaggggctgatctttctgaccaaccatggcgatctggtgaataaaatcctgcgcgccggtaacgatcacgaaaaagagtatctggtcaccgttgataagccggtgaccgatgagtttatccgcggcatgggggcgggcgtaccgattctcggcacggtgacgaagaagtgcaaagtgaaaaaagaagcgccgtttgtgttccgcattaccctggtgcaggggctgaatcgccagatccgccggatgtgcgaacactttggctatgaagtgacgaagcttgagcggacgcggatcatgaacgtcagcctgacggggatcccgctgggagagtggcgcgatctgaccgacgatgagctgatcgatcttttcaaactgattgaaaactcgtcttcagaagcgaaaccgaaggcaaaagcgaagccgaaaacggccggcatcaagcgtcccgtcgtggcgattgaaaaaaccagcgacaagtcttcccgcccggcgtcgaacggcaaacgctttaccgcgccggggcgcaagaagaaagggcgttaacgtctgccgcgcgtcggggtatttgccgaccaggaaaacgaggcctctgcgtctggtttataagcctgctttttcttcagctggcgggctttcttagcctcggcctcgcgcagggccatcagtttatcgatgtactcttttttcacgctattggtttccgcgttggtcagcggacggccatgggcgatgcgtgcgcggtctagcagggttttcagttcgcgctgttcgcgctcggtcatctctttttgcgtgatgcgggggagtgccatagtggtgccctcaattagcctgtggtttcagtgtacggtattggggctgacgtctcacggtaaattgttgtgcctcgcagaaaatcccggaggcggcgctgcgcacctgtccgggctacaaaacccgcaagctgcacggaccgtagcccggctaagcgcagcgcaagccgggaaaattacgggttattcgcgctcttttaccgtttacgcggtttgtcggcgataggcttccctgaccagtagccggccagcagcgagccggacaggttgtgccagaccgagaacagcgcgccgggcagcgcggccagcgggccaaagtagattttccccagcgcggcggcaagtccggagttctgcattcccacctcgatcgccagcgtgcggcaggtggattcgtcaaagccaaacagccgcccgccccagtagccgccgagcagaccgatagtgttatgcaggataacggcgataatcaccacaaaaccaacggaagcgatatgcgacgcggagcctgccaccacggcgcagataatcgccagaatgcagaccatcgaaaaggccggcaggaacggctccaccgccttcaccactttcggttgcagatggtgcacgaccagccccagcgcaatcgggatcaccacgatttgcagaatgctgagcagcatccccatcacgtccacctgaatatgcgcatccacgtacagacgcgtcagcagcggggtggcgaccacgccaaccagcgtggaaaccgatgagatggtgactgagagcgcgacgtcgccttttgccagaaagatcatcacgttggatgccgtaccgctggcgacgctgccgaccagcaccatcccggcggagagctcgggcggcatgtgaaaaatcagcgccagcagccaggcggcgagcggcatcaccaggtagtggagaaaaatgcctgcggcgaccggcgcggggcgggaaagcacgcgcttaaaatcgtcgactttcagatgcacgcccatgccgaacataatcagcatcagcagcgtcgggacccacgggccaacgggggtaaaagtggatggcgtgtaataggcgataaccgagagcagcagcgcccataatgggaacagccgcgtaagcgtggcgagcatgttgttttccttgcacgtaagttgtgtttgcttgttattgtccggccgggatcgagcccggccatcgctattgtttatcgtgctaagaaatattattcaaacaaattatgttcatgttccgctgcggataagctcccagctgagtccgaagcgcgctaaatatttgcgcaggcggtcagcatcgttaggattggcctttttctgccgggagacggcgaacagctcgcgtccggcttcggagagcgaagcgctgcgctggcagacctccagcaccgtttccagctggcggcgatcgaacagatcgatttccattgcaatatcaggagaagatgtcgtgagctgccagctctctttcagcagcattatctcctcttccgcaacggccagcgtaatgcgcccctgctcggccagggtcgccatacgcgccacggaggagcctagctcgcggaaattgccgcgccattgcgcctgcggcgagcaggcaaaggccagatagcgttcgcgggcgtctttatcgaagcggatctgcgtctgccgctcgttggccagtcgccgtaattcatactccacgttcggcgcaatatcttcccgccgctgcgccaggccggggagggcaaagcgccacatattgatgcgcgcataaagatcttcgcgaaagcgcccctccgccacccactgctgcatatcgcgatgcgtgccggcgattagctggaagtcgctgtgcacctctttatccgagccaaacgggaaaaaggttttttcttcgatggccttcagcagcatagcctgctcatccagccccagctcggcgatttcatcgagaaacagcacgccgccgtcggcttcgcgtaatagcccggcgcgaggcgtaaccgcgccggtaaacgcgcctttgacatgtccaaacagcgtggacatggcgttatcaccgcgcagcgtggcgcagtttaccgccatgaattttcccgccacccgatggcgcgactgacgaagctgaaaaatacgtttggcgaggacggacttcccggcgcccgttgggccggtcagcaggatcggatcggtcgatcggatcgccacgcgctcaatacgatcgataagcgcgttgaacgtcgcattacgcgtctcgatacccgccttcaggaaggagacggactgctgctgctcgcgctgaaagcggctggtgagcgtggcgtagcggcttaagtccagatcgatcaccgagtaaataccggcggcgacggcgtcatccgctgcgcctttcggcgcagggctggtctgcagcaggctggcggggagatagcgcgcttcggtcagcaggaaccagcagatctgcgccacgtgggtcccggtggtgatatgcaccagatactcttcgttttcggtatcaaagcgatagcggttggcgaagtcgagaaacgccgcgtagacctcttcaaaatcccacggatcgtttatctcaatcgtatgcgggcgcacttcggtatgcggcgaaagctgggcgacatcgtcaatcagcttttgcgccatattttcatcacgcggctggtggagaagctccagcctgtcgacaggaaaatcggcctgctggcatagcccaacggtaggccgccattttttaaagcgattcgcccgcttgccgcgtttgtccagcaccgttccgaggacgccaatgaccactcgccgctttttcatgtttatcccaaaagataagtttcgatatttaaagataaaaaaacctgctgccggcggcaagcgttaccgtttgaattaaaaacaaaagcgttattaatcaattgattgaaaaataactctcgcattttttattgttggcacgcaactggcaatatcccttccgtcacgacgctgaaaacgcagggggttaaacctcgccggcacgccaggaacggtacaggccgtttttcgggcgcgttccgtcagccgatgaccaccaatgggttcgattcccgatttcatctccaatgaaaactggtcgttaatcatagaaataacgcggggtgatgcgcagtcagcatgccccacagcaggccgccggtaaaggcgccgtgccgcaggcaaaagggagttcccctgcggcttcgcccctgcacccgcgcctgattttgctaaggaacaaaaaatgacgaagaaaatcacgatacgtaaaggtcagcttggccttttatcccgtcagggtgactactatcaggttctggaagcgggcgagcatcgcctgccgtggttcaacgtccccgaagtgctgatcgttaaccgggacggcagcgaagtgccggaggcgctggcggagtatttacgacgctttcagccggaatggattgaacgctactgcctggcggcggatttgacggatgtcgaggccggggcgctgtatgccaacggtgtgctgcaggaaattttaccgccttcgacgcgccgactgtactggtccgccggtgatgaaattcagctgctacgtatcgatacccggcaggttgcggttccggctgacattatgaatgcggtgctgcagccgcgacgtcacggggcggtaaaaggtcgcgaagcgatcctcaccgtatcggtgccggcgtggcacgtcggggtgctgaaaatcgacggcgagacacaatcgctgctgcagcctggcctgagcgcgtactggaaggtcaatcatctggtggaagcggaagtggtcgatacccgcctgcaggtgctggaggttggcggccaggagattctgaccaaagataaagtgaacctgcgtttaaatctggcggcgaactggcgctacagcgatgtactgcaggcgtttggacagctgacgaagccgctggaccatctgtatcgcgagctgcagtttgcgctgcgtgaagccgtcggaacgcgaacgctggatgagctgctggaagataagaaaatcattgatgaggtcgtgagcgcgcaggtcaccgagcgcatggcggcatttggtatcgacgtcgcgtcgctgggcgtgaaggatattgtgctgcccggcgacatgaaagccattttgtcgcagctggtggaggcggagaaatcggcgcaggcgaacgtgatccgccggcgtgaagagaccgcggcgacgcgctcgctgctcaacaccgcgaaggtgatggagaataacccggtcgcgctgcgcttaaaagagctggaaacgctggaaagagtggcggagcgtatcgataaaatctcggtctttggcggcctggaccaggtgctgcatggcctggtgaatctaaaaggataatgaaaatgacgtatcacgctgtaagcgccgccatgcgccataaggtgcagcggcagttaaaagacgtggagcagcgctacggcgtcagagtgctctacgcctgcgaatccggcagccggggctggggctttgcctcgccggacagcgattatgatgtgcggtttctctacgttcacccgctggagtggtacctgcgggtggatcccccgcgcgatgttattgagctgcccatcgacgatgagctggacgtctgcggctgggagtggcgcaaggcgctgggtctgctgaaaggggcgaacccgacgctgatcgaatggctggattcaccggtggtgtatcagcaggatgacgcaacggttcaggcgctgaagaaagtgataccgcattggttttctccggttcgcgcccgctggcattactattcgatggcccgtaaaaattttcgcggctatctgcaaggcgaacgggtgcggctgaaaaagtacttttacgtactgcgcccgctgctggccgtccgctgggttgaggcgggaaaaggcgtgccgccgatgcgctttaatgaactgctggcaggaagcgagctggaagcgggtctacgtgcggaaatagacgaactgctggaacgtaaacagcgcgcaggagaggcggaaaacggcccgcgtcgaccgctgctgcatgcgtttattcagtccgagctgctcagaggcgcaatcccgccagcgctgcctgagagccggagcggtgatgtcagggagttggacagattgctgatgaccacggtgatgggaaactaaaaatggcccggtagaaatggcgggccattttattcgctattactcgaacagattatgatgcagcttctgcaccactttttcggcatccgcacccgggaccaggaagcacaggttatggctggatgcgccgtagcaaatcatacgaatattaaacgggtccagtacgccaaacacctctttaccgacgccgcacgccttcgacagttcattaccaatgatggcgaccagcgccagatcctgctcgacctcaacgcggcacagagaggaaagttcggtcaacagtccctgggtgagcagggtatcgccagccgacgtcgaaccggtggtatccatggtcagcgccacgctcacttccgacgtggtgatcagatcgacggagatactgtggcgggccagaatactgaatacctcggccagaaaaccgcgtgagtgcagcatattcaggctgtgcagggttagcagcgtctgcttgcggcgcagcgccagcgcgcggaacagcggcgggttttcggtgtttttgcacaccagcgtgccgccggctttcggctctttgctggagccgacgaataccggaatatcgctgcgcacggcggggagcagggtagccggatgcaggaccttcgcgccaaaggtcgccatttccgccgcttcttcaaaagcgataacgtcaatgcgtttggccgccggggcgacgcgcgggtcggtggtatagatacccggaacatcggtccagatgtcgacgcgggtggcgtttagcgcttcgccgagtagcgcggcggtatagtcgctgccgccgcggccaagcgtggtggtgcggcctttggcttcgctgccaataaagccctgggtgatcaccacgccttccgcaagacgcggggccagcagctgctgggttaattcggataaggcggcaatatccggttccgcgcggccaaagcggtcgttggtgcgcataattttgcgcacgtcgaaccactgggcggcgataccgcgctcgcgcaggatctcgacaaacagcagagtagacatcagttcgccgtggctgaccagttcgtcggttaacgcggttgaactggccagggaggcggcttccgccagggtggtgatgttttccagcaggcgctcaatttcatcgcgaataacgttgggatagcgcaaacgctccagaatattgaactggatttgacgcatggcatcgagcttcgcgaaacgttcgccgggttccagcccttccgctaaggcgaccagcaggttggtcacccccgctgaggcggaaagcaccaccacgcgggtattggcgtccagcagcgcgacgtccacgctgcggttcatggcatcaaaatcggcaacgctggtgccgccgaacttggctacaactaagtctgtcataacaacctcgtgtcagggggcctgacttattaaaacgattccagaaaaccaatcctggcggggctggacgcaaccggattgcaataaaatgtcttaataagccaggccaaattattcagccatggcacaagggaagagcgaaaaacagggtgggcgcagagcgataaacaaactacgatgtcacccagaagtgctccaccttgtagacccgcttgccgatgctgtgcatcagacggcgagtatgaaacgcccgactgcgaacgtttctggtgacaacccaggggattcagcccctgtggccggtgatgagcgtaaccagacgcttattcacctcggcgttgctccccctcacgtattttccccggactggctcctccaatacggttacctgggcaacgcacctcttctggcaattaccgacgtctttcactttgccagggggacgcgggacattatacccccctgcaataccctttcgctgtagcgtgaaatgcgcgatccatacctacctacgtatatgtaggtactgccgttatataaaggcttcaggcgaagtatgtcaacgtcagggttatgcggatttttcatgcgcgagtcgctgacagaaaaaagccttatgatgtctatactatgaggggcgatttgcgccaaattggctctaatcctgacgcgtatcatcggcataacacaaaaatcatcacaatttttcgtcaccggcgctacaatcgaccgcagtcacaattctcaaatcagaagagtattgctaatgaaaaacatcaacccaacgcagacctctgcctggcaggcattacagaaacactttgatgaaatgaaagacgttaccatcgcggatctgttcgcgaaagatagcgatcgtttctctaaattctccgccacgttcgacgatctgatgctggtggatttttccaaaaaccgcatcaccgaagagacgctggcaaaactgcaggacctggccaaagagaccttcctggcagacgccattaaatccatgttctccggcgagaagattaaccgcacggaagaccgcgcggtgctgcacgttgcgctgcgtaaccgcagcaatactccgattctggttgatggcaaagacgtgatgcctgaagtgaacgccgtgcttgagaagatgaaaaccttctccgaagccattatctccggcagctggaaaggctacaccggtaaagcgattaccgacgtcgtcaacatcggtatcggcggctccgacctcggcccgttcatggtgaccgaagcgctgcgcccgtataaaaatcacctgaatatgcattttgtttctaacgtcgatggtacccacatcgccgaagtactgaaaacggtgaacccggaaaccaccctgttcctggtcgcgtcgaaaacctttactactcaggaaaccatgaccaacgcccacagcgcgcgcgactggttcctggcgaccgccggcgatgagaagcacgtcgcgaaacacttcgccgcgctctcgaccaacggtaaagcggttggcgagttcggtattgataccgccaatatgtttgagttctgggactgggttggcggccgttactctctgtggtcagccatcggcctgtccatcatcctgtccgtgggcttcgacaactttgttgagctgctctccggcgcgcacgcgatggataaacacttctccaccaccccggctgagaaaaacctgccggtgctgctggcgctgatcggtatctggtacaacaacttcttcggcgctgaaaccgaagcgattctgccgtacgaccagtatatgcaccgttttgccgcttacttccagcagggcaacatggaatccaacggtaaatacgttgaccgtaacggcaacgccgtggattaccagactggcccaatcatctggggcgagccgggtaccaacggtcagcacgcgttctaccagctgattcaccaggggaccaaaatggtgccttgcgactttatcgcgccggcgattacgcataacccgctgtccgatcaccatccgaagctgctgtctaacttctttgcgcagaccgaagcgctggcgtttggtaaatcccgcgaagtggttgagcaggaatatcgcgatcagggtaaagatccggcgaccctggaacacgtggtgccgttcaaagtgtttgaaggcaaccgccccaccaactccatcctgctgcgtgaaattacgccgttcagcctgggcgcgctgattgccctgtatgagcacaaaatcttcacccagggcgtgattatgaacatcttcaccttcgaccagtggggcgttgagctgggcaaacagctggctaaccgcatcctgccggaactgaaagatggttccgaagtgagcagccacgacagctccactaacggtctgattaaccgctataaatcctggcgcgcataatcgctaaaacgttcgcaatgccggcccatgtggccggcatttttgttatagccgccgcagcagctttgccgggttcccggcccacacgcctttctccgtaatggatttggtcaccacgctgcccgcgccaatcacgaccccatcgcagatgctgaccgccagaatggttgcgccgctgccgatagacacatcgttgccaatcacaattcttccccagctctcgcggtcggcgttgggttttccctcgcggaacatatcgttggcgaacatcacgccgtggccgataaaacagcgctcgccgatggtcacgtactcgcagataaaggtgtgggactgaattttgctgtcgttgccgatacgggtatggccctgaatctccacaaacggcccgatgaagacgttatcgccaagcgtgcagtcgtagaggttggcgggctggtaaatcaccacgttttcgccgctggcgacgttgcgaatggcggtttcacgaagggtatgcatgctgcctctcagattggtttagccagaatatggagtgtgctttcctgggttgcagaatgaaatgccacatccttcacgtgctgcatcccctgacgttcataaaaacggcgggcaccggtattcgcggcgagcacttccagccatagccagctttcaccggtctctttcgctcgcttctcgacggcgcgaaaaatctgctcgccgtagcgatgcccggtagcgtcaggtaatagatagagtttatgcaatagcgtacccgtagggccttcggggttgatgtcctggcggcaggcatatttagcaaagccaattggctcctctgcctcagcaatcaaccagcagcactgcggatcggccaggctgtgcgccagcgcggccatggaatactcttgctgcaggtagtgctccatttcatcggcgttgtgccagaggtgggcaaagtggtggcgatagctggcattggccatctggttgagtaaagccgcatcttccggacgtgcaagacgaatctttagcattctgcgttcctcgcaaagaagtggcgatattttgcccgtaaagttcgctgcgggtaaacctcaaaagtgggggggataagaagtggccggaggatggcctccggccggggatcaggcgacggcgatggcttcgatctcaatgcccgcatctttaggcagtctggcgacttcgacgcaggaacgggccggaaaggccgcgttgtgttcggtgaagaacgcttcatacaccgcgttgatggtggcgaagtcattcagatccttgacgaagaccatcgtcttaacgatgtttttcacctgcaaacccgccgcttcaacgatagccttaacgttgtccagcgactgtcgcgtctgctgagcgatgtcgtcagacatggtgccgtcctgcggattgaccgggagctgccctgaggtcatcgtcatggtacccagatttactccctgaacatacgggccaatggcggcaggcgcagcggcggtggtaattatcattctgttgattccttctgataggtgattacatgaaatagttgagcaaaaccagtgaaccgacgccgctgacgacgacccagaccaggcccaggcggaagctggcgagcgtgcagataatcgcggcgatcaccttcgggtttttcaaatcgaactccatgctggagttcacgctcaggatctgaatcgtgatgatggccggcagcacggtcaccggcacaaaacgcagcgttttgctgacccggctcgacatctgaatcttcccggcgaggccaatgaacgagaagcgaataagaaaggtcacggcggccatgcccagcgtcagggcgataaaaaagctattactcattttccagcgctccttcgagagagagtttgtcagcggcctgcgcctgtttacgctcttcggcgagatcgacgctcaggcccgccattacgcccagtacggacgcgacgacgatacctaacgagtagggcagtacgaccaaaagtaccccggatacggcagcaacaacggcggcgacggtgcaggcctggcttttgatttgtgggactacgatggcgataaatgcggcgaccatcgcgaagtccagaccatatttttcaatgtgcggaaaagaggcgccaaccagagcgccaaggaaatcggccagcacccaggcgaaccaaaacgtcagcattgctgaaaaatagaaaagatatttatcttttttattctcctccatctctttcaccgtcgtggcgtacacttcatcggtcagggcatacgccataaagcattttttaaagaaggaggcttcgcgtaccgtactggaaatagaggcgctataaagcacatggcgaagattaataatcagcgtggtgaatataatcaccccaaggctcgctccggtttttagcatatttaacgccagcatttgtgccgaaccggcgatgacaatcgtcgaccatgccgtactttgccagatactcatcccggcgctaacgcttagcgcgccgacaataaatgaaaacggaaagtcgccgatgcacaggggaagtatggcgctcataccccgtagaatcacttttttgttcataaacaatacctgttgtattcaggagattaattatttgtgtaaggtacattaaaacgctaattaatgattactttgctaccataatgttgatgatttctttatcggtataggccataggcttaattaccagacggcagagattattaatagtctgctcaacgtcagcgcaaacaatgccgtcattagagcctgcgcagctattttgcatcgccatcagtacggccttaaaggcgctggaaaccacggacgatactttcattgcgcagctattagaggcgccatcgcaaatcatgccggtaatatcgctgatcatattaataatagcggtattaattgtttgcaggtcacgggtaaataaccacgccatgcctgccgcggcgcccatcgctgccgtggacgccgcgcatagcgcggacagacgcgtatagcgggagtggatcgatatggcggtcaggtgggagagcgccagcgcccgcgcgagggtctcttcatcagcgttaagatgctccgcgaccgtcactaccggcatggtggcggcgataccctggttaccggaaccaaagttagacatcgcgacgacgggggctccgcccattcgcgcgtcggatgcggcgacggtattgatgatgactttactcagcaggtcgttgctgagcaggccattttttaccgcatcagagaaggtgccgttgatgttcaagccgtattttttgcttttaccttcctccgccagcgccgaattgagccgggcggcttcgagaataaatgcgatgtcggcgaattcgacctcgttaataaaattaaaggcttccgcaagcgagaaggttgctaatgtttcctgctgcgttaccgtactctgtttgtccgccagtacctgcgcttcgccattaatatacagctcaacgatattggtatgcgtgcccttgaccaccacgcggcagctcttttcgccacccgttagcgtcagatccagatgaataaagtcaggggtatctttcacgctaatattgacctggccatcggcaattaacttctgggctaattcaacatgccgttcggtaattccctccagcgtttttaaacctttatccgcatcgccaccaaatgcgccaattgcggctgcgagcgccaccccgctgacggaagtgcccggaatagttacgcccatcgcattcttgtacaggttcgcagaaataaaaccgctaatgttttgacaagccgtatctaaatgtttcgcagcgtaagcggcggtaaaagaaatagcaacgggttccgtacagcctaatgccggagccacttctttttttagccagtttataaacagggatgagtgttcagtagtcatattttatatcgttccgctaacgagggtttattaatctgcgagtatgctaagtcaatttctaaggaaaaacttactctaatgcgggcgtaatttatgcctgaaagagaaaaatattcgcttattacaatattgtaaaattgtgatcttattatggttaattaactgatttgacgggtatttatattctgttttttgaacataaaaagggatttagttaactacctcacagcgttgccgaaagtaaaaatttctctttttacgtatttcatcggagatgagaaaggcaagcagtggaaagaagggactcacaaatgtagatctggatcacatttttgcgttatacaggtcacaggaaatcatgatgatgaggtgtacctatgccgccggtttatcgtccgttggtgagttttattgcaaccgcaatgcaaaccgttttgaatcttggcctgctgtgcctgggggtcattctgatcgtatttctgggaaaggagacgctgcatctggcgcacgtcctgttcaccccggagcctgtcagcaagtacaagctggtggaagggctggtggtctacttcctctatttcgagtttatcgcgctgatagtgaagtactttgagtcgggatttcacttcccgctgcgctactttgtctatatcggcatcaccgcaatcgtccgcctgatcattatcgatcatgagtcgcctatggcggtgctgatttactccgcggcgatcctgattctggtgataacgctctggctgtgtaactccaaccgactgaagcgcgaataaaaaaagcggcctccagggccgctgaccaacagtcacaaatagaatttatgtagggtccagttgaggatagcagtggcatttgccttactttttcagctgagggcgacggcggtaatacccggttggggtcgcgcattaccgctaaaccgtcggccctcatctgaaatttggggcgggtgttacaaaaaaattaacctttcactccgccagccgtcaggccgttaaccaaccagcgctgggccagcaggaacaccacggtaatcggaatggcggaaagcaccgccgcggcggcaaagtcgccccacagatagttctgcgggttaagatactgctgcattccgactgcgagggtatagctgttcacatcgcgcagcagcagcgaggctaccggtacttcggtgatcgccgcgatgaacgacagaataaacaccaccgccagaatcggtaccgacagcgggagcagcacgaggcggaaagcctgccatggggtcgcaccgtccagcgccgccgcttcttccagcgagccgtcgatggtttcgaagtaacctttgattgtccagacgtgcagcgcgataccgcccatataggcgaagatgacgccgccgtgggtattcaggccgacgaacggcacgtactggccgagacggtcaaacagggcgtacagcgcgaccagcgacagcaccgcggggaacatctggaaaatcagcatccctttcagcagcgttgctttacccgggaagcgcatgcgggcaaaagcgtaagcgcaggtggtagaaagcgcgacgatgccaatggcggtaatgcctgccaccttgatggagttccacagccacagcagcaccgggaaggggggcggcgtgacgcgaccatcagcgtgttcgacgctgaagccgagcgccagccgccagtgctcccaggagatactttcggggatcaggctaccggtggcgaagttcccttcgcgcagagagatagcgatgaccatcagcagcgggaacataatcgccgcgataaaaatcagcagcaggaggtgcgtcgtgaacaggcgcagcttctgagatttgggttgaaccatagccataatcgttatctcccttaatcaaacttcatacgtgtggctttcaggttaacaatcgccagggcgcctaccagcaggaagatcagcgtggcgatagccgccgcaaggccgaagtcctgaccgccgccgccttcaaaggcgatacggtaggtatagctcaccagcaggtcggtgtagcccgccggcgtggtggtaccgagccggtccggcccgccgttggtcaacagctgaatcagcacgaagttgttaaagttaaaggcgaagctggcgatcatcagcggcgtcagcggcttgatcagcagcggcagcgtaattttgaagaagttctggaacggcgtagcgccatccattgccgaggcttcatataaatcgtcaggaatcgctttcagcaggcccatgcacaggatcatcatgtacggatagcccagccaggtgttgacgatgataatcatggtacgcgcggtggtcgggtcgctaaaccaggccggcttgatgccgaacagcgcgctgagcatcatgttgatctcaccaaagctctggttgaacaaccctttgaaaatcagaatcgagataaacgacggtacggcgtaaggcagaatcagcagtacgcggtaaatcgctttacctttcagggcttcccactggacgagacaggcgagcaccatgccgaccgcaacggtgagaatcacggtcagaacggagaacaccaccgtccagacgaaaatcgcgaagaacggtttctgaatgccttcatcctggaacacgcgagtgaagttatcccagccgatggtcacggtgtagcccgggctgagcttttcgctgccccagctaccgtcggcgttgatcgcctgatagaaaccgacctcggcgttcggacggtatttcacgccgctctggttgttggtcagcgtgccgtcactggccagcgcgtacagcggctgagtaccggagaactgacgcagggagctcataatgactttgctttcatccggcaacacggcggtcagctggttcagggcggtacggttttgcgtaatcacgcgcagcgtggcgcgctcgccttccggcagggcgtcagcctcttttaaggccagcttctgttcgccgccgaatttaaaggcgtcggaaagatagtttttgccgctttcgccgtcggtcagcgccagcttccactcatctcccgccggataaagcgcgaagttgtaggatttccctgcctggaaggagcggtccatcagcacctgttgggcgcgttcgaaggtcagctggttagtgctgctgtagttggtaaaagcgatagcgatagtgcagatcagcgggaacaggacgaacagccccatcccggcgagacccggataaacatagcgccaggcgtaggccttgcgattggaaaaaatatacaggccaaccgagctcaaaatcagcgtcatgatggcaaacaggtactccccctgggcgtacatcaaaacaacaaggtaacccaccagcaggcacagcaagccgatcacagaccatgtgagctgcgggctttgccaccagtgcttctttttcacgacatccatggggatcatcctctttacactttatccttcgcgctacctctttgttggctgcagatgcgtaccccagtcacttactgatgtaagcgcctggggatttgcatccttgccgcctcgatgtagcgcgaatgatttcgcgtaacaacgtattcaacaaaccttattccctaagaaataagggaaaccgtattacttggtgatacgagcctgtgcgtctttcagcgccgcatcgacggtctggcgaccgctagctgcgttgatcactgcggtacgaacggcataccagaaggcggacatctgcggaatattcggcatgatttcacctttctgggcgttagccatggtggcggcgatacgcggatctttttccagtttttcctggaaggatttcagcgcgaccgcgcccagcggtttgtccttgttcacttcatccagaccctgatcggtcatcaggtagttttcgaggaactctttcgccagttctttgttcgggctggcggcgttaataccggcgctcagtacgccaacgaacggtttagacgggttgcctttgaaggtcggcagcagggtaacgccgtagttaaccttgctcttatcgatgttagaccacgcccacggaccgttgatggtcatcgcggtttcgcctttgttgaatgccgcttccgcgatggagtagtcggtgtcggcgttcatatgtttgttcttgataaggtcgaccaggaaggtcaggcccgctttcgcgccagcgctatccacgcctacgtctttcacgtcgtacttgccgttttcaaacttgaacgcataaccgccgtcggcggcgatcagcggccaggtgaagtacggttcttgcaggttgaacatcagcgcgctcttacctttcgctttcagttctttatccagcgccgggatctcttcccaggttttcggcgggtttggcaccaggtctttgttatagatcagcgacagcgcttcaacggcaaccgggtaggcaatcagcttgccgttatagcgaaccgcatcccaggtgaacggatagagtttgtcctggaacgctttatccggggtgatttccgccagcaggccggactgcgcgtagccgccaaaacggtcgtgagcccagaagatgatgtcagggccgtcgccggtcgcggcaacctgcgggaatttctcttccagcttatccggatgctctacggagactttaatgccggtgtctttttcaaactttttacccacttcagcgaggccgttgtagcctttgtcgccgttaatccagataaccagcttaccttcttcgatttttgcgagggcagaggcggaaaacatcatcgtggtcaatgcagacagcgcgaggatgcgagcgccagttttgattttcatatacccgtcctatttggtgatgtgctcgtggatacacttgagtggcttaacggtgatgagtttccttttttaacaacctctttccatcctccccatgtctacgccccatcccccgatagtgtgatctccattacagaaatgccggttatgagtcctggagcacataaaaaggcggccaattttgcaggctacatcacgaaatcgacgtccgtccgtcccccccggcggcgagacgcaatctctcatcctcccgcctcctcccccataaaaaagccggggggtggaggatttaccctatttatgaatgccgcatagtcagcccatcttgaatgtgtcgttaagtgacaggttgtaacgaagggagaagggcatggcgagcgtacagctgcgaaatgtaacgaaagcctggggtgacgtagtggtatcgaaagatatcaatctcgagatccaggatggggagttcgtcgtgtttgttgggccatcaggctgcggcaaatccaccctgctgcgtatgattgccgggctggaaacggtgaccagcggcgatctgctgattggcgatacccgaatgaatgatgtcccgcccgccgagcgcggtatcgggatggtgtttcagtcttatgcgctttacccccacctttccgtcgcggaaaacatgtcttttggcctgaagctggccggcgccaaaaaagagctgattaaccagcgcgtgactcaggtggcggaagttcttcagctggcccatctgctggagcgcaaaccgaaagcgctttccggcggtcagcgtcagcgcgtggcgattggccgtactctggtggctgaaccgcgcgtgttcctgctggatgaaccgctctctaacctcgatgccgcgctgcgcgtgcagatgcgcattgagatttcccgtctgcataagcgtcttggccgcacgatgatttacgtgacccacgaccaggtcgaagcgatgaccctggccgacaagattgtggtgctggacgccggtcgcgtcgcgcaggtcgggaagcctctcgaactctatcactacccggcggatcgtttcgtcgcgggctttattggctcgccgaagatgaatttcctgccggtgaaagtcaccgctaccgccattgagcaggtgcaggtggagctgccaaaccgtcagcaggtctggctgccggtggacagcgcccgcgttcaggtcggcgccaacatgtccttagggattcgcccggaacatttgctgcccagcgatatcgccgacgtcaccctcgaaggtgaagttcaggtggtcgaacagctcggccacgaaacgcaaattcatattcagatcccatccatccgtcagaacctggtttaccgccagaacgacgtggtgctggtagaagagggagccacattcgccatcggtttgccgccggagcgctgccatttattccgtgaggatggcaccgcttgtcgtcggctgcataaagagccgggcgtgtaaggcttctaactaaaaaaaaacacaaaaccattcgcgctgcatcgaggcggcaagggaatgaatccctgggagcgtacaaaagtacgtgaccagggtgagtgagcgcagccaacaaagaggcagcccgaagggtgaagtgttcaaagaaaagcaatgatctcaggagatagaatgatgattactctgcgcaaacttccactggcggtcgccgttgcggcaggcgttatgtctgctcaggcgctggccgttgatttccacggctacgctcgttctggtatcggttggaccggcagcggcggtgagcaacagtgcttcaaagccacgggcgctcaaagcaaataccgtcttggcaacgaatgtgaaacctatgcggaactgaagctgggccaggagttgtggaaagaaggtgataagagtttttatttcgatactaacgtcgcttattccgtaaatcaggaagatgactgggaaagtacctctccggcgtttcgtgaagctaacatccagggtaaaaacctgattgactggttgccgggttctaccctgtgggccggtaagcgcttctaccagcgtcatgacgttcacatgatcgacttctactactgggatatctccggcccgggtgcgggtctggaaaacgttgaccttggcttcggtaaactctctctggcagccacgcgtaactcagaaagcggcggttcttacactttctccagcgatgacaccaagaaatttgctgctaaaaccgcaaacgacgtctttgacgtgcgtctggccggtatggaaatcaacccgggcggcgtactggagttaggcgtggattatggccgcgctaacccgcaggacgattaccgtctggttgatggcgcatcaaaagacggctggatgttcaccggtgaacatactcagtctatctggggtggcttcaacaagtttgttgttcagtatgcgaccgactcgatgacctcctggaacagcggtcactcccagggaaccagcatcgataacaacggcagcatgatccgcgttctggatcacggcgcgatggacttcaacgatgactggggcctgatgtacgttgcgatgtaccaggacgtggatctggacagcaacaacggttctacctggtacaccgtcggtgttcgtccgatgtacaaatggacgccgatcatgagcacccagctggaagtcggttacgacaacgtgaaatcccagcgcaccagcgaaaacaacaaccagtacaaaattaccctggcccagcaatggcaggcgggtaacagcgtctggtctcgcccggcaatccgtattttcgcgacctacgcaaaatgggatgagaactggggctacagcaacacctccggtctgcagactaaagacggcagcggtaacggggtttacacctccagccgcggtaacgatagcgaagtgaccttcggtgcgcagatggaagtttggtggtaacaccgccgtaatcatgtagtgacacggaggggctctgcccctcctgattcttcaggattagcgcgctattgcctggccaccgctaaacctacgctatccgaggtgagaacaatgaaaatgaagaaaactctcgtcgccctgtgtttatccgcaggaatgttggcatgcgcgccgggaacgagccttgctgacgtcaactttgtcccgcaaaacaccagcgcagcgcccgccatccccggcgctgccctgcagcagctcgtctggacgccagtcgatcaatctaaaacgcagaccgttgatttactcacgggcggccagcgcttggatgttgccggcatctccggcccggttgcggcctggagcgttccggcgaatattggcgaactgaccctgacgctcacgagcgaagtgaataagcaaaaacagatttttgcgccgaacgtgctgattctcgatcagaatatgacgccatccgcgttcttccccagcagctattttacctatcagcagcccggcgtaatgaccgcggatcggcttgaaggcgtcatgcgcctgaccccggcgctggggcagcagaagctttacgtgctggtctttacgacggaaaaagatttacaacaaaccacaactctgctggatccggcgaaagcttacgctaaaggcgcgggcaatgccgtgccggatattccagacccgattgcccgccacaccaccgatggcgtgctgaagctaaaagtcaaaaccaatagcggctccagcgtgctggttggtccgctgtttggctcttccggcaatggcccggtgaccgtcggcaataccgccgcgccggttgtcgcgccggccccggctccggcggcgaaaagcgaaccgatgcttgatgacaccgaaacctatttcaacaacggcattaagcaggcggttgcgaaaggcgatatcgataaagccctgaaattgatgaacgaagctgaacgtcttggctcgaaatctgctcgttccacctttatcagcagtgtaaaaggcaaggggtgaccgtctccccgcaatgctgatgtttaggcacagcctttaggtgcgtccgtcagggcgcacttttttttagcgcgccgcagcctctgttgcacggctgttgcgcggatgatcgtatattgacgtttgcccgcccccgatgccccattctgcgatacaatacctttacgttatgtaccggagattcaggcatgccacatcctgcgcttacgcaactgcgtgcgctgcattattttgccgctatgcccccgctggatgcgcatttgcgcgactggctattgctggaagactcaatgaccaaacgctttgagcagcaggggaagaaagtcagcgtcatcatggttaacgaaggttttgttggacgcgacgcgctggccggtgaggcgcccctgttaccgagcgaaccccgctactggctgcgggaaatcattctttgcgccaacggtgaaccctggctggccgggcgcacgatagtgcccgaatcaacgctgagcggccccgaactggcgctgcaacagctggggcaaacgccgttgggccgctatctcttcacgtcatcgacgctaacccgtgattttattgaaattggtcgtcatgcagagctgtgggggcgtcgttcccgcctccggttgagcggcaaaccgctgctgctgacggaactgtttttgcctgcatcgccgttgtattaagaggaaaatgaaatggagtggagtctgacgcagaacaagctgctggcgtttcaccgcctgatgcgtactgacaaaccgattggcgcgctgctgctgctgtggccgacgctatgggcgctgtgggtggcgacgccggggataccgccgctatggatcctcgccgtttttgtcgccggcgtctggctgatgcgcgccgcaggctgcgtggtcaacgactatgccgatcgcaagtttgacggccacgtcaaacgaacggcccaccgcccgttgccgagcggcgacgttagcgaaaaggaggcgcggacgctgtttgtcgtgctggtgctgctttcgtttctgctggtgttgaccctgaacaccatgaccattctgctgtcggtagcggcgctggcgctggcatgggtatatccgtttatgaagcgctatacccacctgcctcaggtcgtgctgggcgcggcgttcggctggtcgatcccgatggccttttcggcggtcagcgaatcgctgccgctgagctgctggctgatgttcctcgccaatatcctgtgggcggtggcctacgatacccagtatgcgatggtcgatcgtgatgatgacgtcaaaatcggtatcaaatcgacggcgattctctttggcgacaacgatcgcttaatcatcggtattttacaggtggcggtactgggtctgatggccgcggtaggctggctgagcgggctgggctgggagtattactggtcgttgtttatcgccgcggcgctgtttgcctggcagcagaagctgatatttaaacgcgaacgcgatgcctgctttaaggcgtttatgaacaataactacgtggggctggtgctatttctcggcctggcgatgggatatatgcagtagcgctgtgggtttcccggcttgcggcgtaaacgccttagccgggctacaaaaccgcagggtccggtagcccggcgcaggccgggacatctctttaagcgttacgcttcatcctgggtaacgctttcaatcgttaatcgcacatccgaagtaatcagatccgccagcatgcggtagatcttcaacgtctcttccggctcggcgtccccggtatcgctgatatagccttcgtcacgcagggtcaacaccagcgtgctgaacaccgccttatcgaagaactccggcgcgttgatgccgtgcagaacggacaggcgctgcgccacggtgcggctctctttctccagcgaactgcggttgattgacgggttagcgctcagcagccagaaggtaatggcgtagcgctgcagcgtttcgcgcgcgcctgcggccagcagctgcagagaacgggcatgagacggattgacgctcacctcatcgtcgttcagggcgatgagtccctgacgctgcatttcagcgatcagcgcatcgacgacgcccgccagctccgctttttcccagcgcaggaacagctcggccttcaggaacggatagaacatctcgacgtgacgcaggatttcggcgcgggtaatacgacgatgctgagtgacgatggcggctaacagcgacggcatcaccagcatatgggcgatgttgttgcggtagtaggtcatcagcacggcctgctcgcgcggcagaatgatgatatcgccaatggtatctttctcgacttcgaacttgttcatctgcagcgcgtggtcaatcagctcgctggccgaagccgcaggcgtggtcgcatccgctgaatatggcacgttgcgcagcagggcgagatagcactccagctgctcggtgagctgctcgcgggtcagtgaacgctgacgcgatgccagcagcgcggtacagcacaggttcatggcgttagccgcgccggcattattgatgcgcaccatcagatccgaggcgatattattcaccgtcggggtcagccaggaagggcgaaccgcttcgatagggtcgatagactcgcgccagtccggcacatgctggttcagataggccatcagcggcaggggttcgccgaagttaacgtagccctggccgagatttcgcagcttgctcaagccgcgcagcatctgcggcaggctctctttctctttcgtcgcaccgcgtagctctttggcgtaggtaccaacctccatcacgtgctcgtagccgatgtaaatcggcaccagggtgatggggcgattaccgccgcgcagcatcgcctgaatggtcatcgacagggtgccggttttcggatccagcaggcgtccggtacgcgaacgcccgccttcaacgaaatactccaccgaatagccgcggctgaacagctcgccgagatattcgcggaatacggttgagtaaagcttattgcccttgaacgtgcggcgaataaagaacgcgccgccgcgacggaagatcggaccggcgggccagaagttcaggttgataccggcggcgatatgcggcggcaccaggccctgatgataaatgacgtaagagagcagcagatagtccatatggctgcggtggcacgggacataaacgatctcgtggccttcatgcgccagctggcgcacgcgctcggcgttatgcacgttaatgccctgatacagccggttccaggtaaagcccagcacgcggtcggtcaggcgaatcatctcataggagaagtttgcggcgatctcttccatcagggcgatagcgttttgctgcgccttttcatgagaaattttcttgctgcgcgcttcgtcttctaccgcacgggcaatggctttcgaggccagcagtttattaaacagatcctggcgcgcgggcaggcgcgggccgaccgccgccagacgctgacgggcgaagtgcatgcgcgccacgcgggccagcttctgggcgatggttttatcggtaccgtgttcgtccgccatcttacgcagcgagaccgaaggcgagaaacggacaaagctgtcgcggcccagccacagaacggcgaagaatttctgaatgccgttgagcatgcgcagcggcgggttcacctcgcctttttcacgccccggcgcgcgaccgaacatcaccgaaaccggcaccatctgcacgtcaagatcgggatggttgcggtgcaaatccagatagtcgtgaaagagcttgatagactcttctttcggcgtgtaataggtaaacacgcgcggtccgccgtggataaatacgtagcgcggaagcaggccgccgtcgatctcgagcggctccagcgggtccggtaactcatgttccagacattgcgcgcgcagcgtcagcaggtccgccttcgaattgtagggcagaacatacataatgggacgcgaggtatccaggcctaattcctgagcaggttgtgccggaatcgacttgctttttaccagcgcccttaatggtaaattcagtaatttatagtaaattcgttgccagccagacatagacgatgtgaagcctctggttaatcatgcaaatgcgccgcaagaataacagaaagtgcgcaaaatttccgttgtaacgcggcaaacgcgtacactcattgacgtcatttacataaaaaggtttgtttgatggccaataataccactgggttaacccgaattattaaagcggcagggtattcctggaaaggattccgggcggcgtgggtcaacgaggccgcctttcgtcaggaaggcatcgcggccgttgttgccgtggcgatcgcctgctggttagacgtcgatgccatcacccgggtgctgttgattagctcggtcctgctagtgatgatagttgaaattatcaatagcgcgattgaggcggttgttgaccgtattggccctgaacatcacgagctgtcggggcgagcgaaagacatgggatcggcggcggtattgctggcgattatcatcgcgctgatcgcgtggggaacgcttttatgggcaaactaccgctaacgcctggcgtagcggctcgcaaaacggaaagaaactcctgatttttgtgtgaaatatggttccaaaatcaccgttagctgtatatactcacagcataactgtatatacacccagggggcggaatgaaagcgttaacgaccaggcagcaagaggtgtttgatctcattcgggatcatatcagccagacgggcatgccgccgacgcgtgcggagattgctcagcgcttggggttccgttccccaaacgcggcggaagaacacctgaaagcgctggcgcgtaaaggcgcaatcgagatcgtttccggcgcctcccgcggtattcgtctgctgacggaagaagaaacgggtctgccgcttattggccgcgtcgcggcgggtgagccgctgctggcccagcagcatatcgaaggtcactatcaggtcgatccggctatgtttaagccgaatgccgattttctgctgcgcgttagcgggatgtcgatgaaagacatcggtattcttgatggcgacctgctggccgtccataaaacgcaggatgtgcgcaatggccaggtggttgtggcgcgcatcgacgaagaagttaccgtgaagcgactgaaaaagcagggtaacgtcgttgaactgctgccggaaaacagcgaattctcgccgatcgtggtggatcttcgcgagcaaagcttcactattgaaggcctggccgttggcgttatccgcaacggcaactggcagtaatctcttcacctcgcggcatcatcacctgatgcatgatgctgcgccgtttttcctcatttgggctctttctccatgctttttaacgccgccgacaaagccctgtggcgcttagcgctgcccatgatcttctccaatatcaccgttccgctgctggggctggtggataccgccgttattggccatctcgacagcccggtttatctggggggcgtggcggttggcgcaacggcgaccagcttcctctttatgctgctgttgttcctgcgaatgagtaccaccggactgacggcgcaggcgtttggcgcaaaagatccgcagcggctggcgcgtgcgctggtgcagccgctgggtctggcgctggccgccggggcggcgattgtgctcttacggatgccgttaatcgacctggcgctgcatatcgtcggcggtagcgaagccgtgctcgaacaggccagacgcttcctggagctccgctggctaagcgcgccggcatcgctggcgaatctggtcctgctgggctggctgctgggcgtgcagtacgccagagcgccggtgatcctgctggtagtcggcaacgtcctcaatattgtgctcgatttatggctggtgatgggcctgcatatgaacgtgcagggggcggcgctggcgacggtcaccgcagaatacgtcactttctttattggcctgctgatggcgagacgcgtgctggcgctgcgcggcgtttccctgtcgatgctgaaaaacgcctggcgcggcgatatacgccgcctgctggcgctgaatcgcgacatcatgctgcgctcgctgcttctacagctctgcttcggggcggtgacggtatgtggcgcccgcctcggtgccgatatcgtcgcggtcaatgcggtcctcatgacgatgctgacctttaccgcctatgcgctggacggttttgcctacgccgttgaggcgcactccgggcaggcctacggcgcgtgcgacgacagccagctgcttgccgtctggcacgcggcctgccgccagtcagggatggtggcgctggcgtttgcgctgatttacgggcttgccggtgagcagattatcgctttgctgacctcgctgccttcgctgcagcagctggccgaccgctatctggtctggcagatgatcctgccggtcattggcgtctggtgctacctgctggacggcatgtttatcggcgcgacgcggggggcggagatgcgcaacagcatggcggtagcggcggcggggtttgccctgacgctgctgacggtaccgacgctcggcaaccacggactgtggctggcgctgacggcctttctcgctctgcgcggcgtttctctggcggttatctggcggcgccactggcagcgcggaacctggttttcgtaatgcatttggtgcatatgatggttaaagattccgaataataaatcttactcagaatactcatctatagttaagtcatgtccggcacacagcgggctgttcattcaccgaacgataaccgaacgatgaggaatgcatgatgaataaagacgaaatcggcggtaactggaaacagttcaaaggtaaagcgaaagaaaaatggggcaagctgaccgacgatgacatgaccgtcattgaaggcaaacgcgaccagctggtgggcagaattcaggaacgttacggttacgccaaagaccaggcagagaaagaagtgaccgactgggaaaccaaaaacgactatcgctggtagcgaaaacgccgtgttttaacccaccgttattgcctacacccttgattcccgctgcggctaacgcctcagcgggctttctttttgatctggatggtatggtcgtggtggcagtggcccggcgtactgcaggattcaacctcgacgcaggcggcgcacaggccgtgagcctcaatgacgttgtggcgcagggcgaatcccattcttgccgccagcgtatgcataatatcttcgacgccttccgcacactcttctttgacgccgccgcagcggtcgcagataaacatcgccgagctgtgggtcggctgatcgaaaaggtgacacagcacgtagctattggtggattccaccttatgcacgaacccttgctcgagtaaaaactccagcgcccggtacaccgtcggcggtttcgcctgaggctctttttcacgaaggagatcgagcaggtcgtaggcgctgattgccccttgctgcaggctcatcaaacgcaatacttcaaggcgctgcggggtcaggcgcacgccacgctgcgcgcacagcttttcagcatgcgctaacatttgttgcgaagtggtcttatccatgagcgtcctctggttgcgtgaatctgaaactgttactttatcacgataccggtaaaacgccgagacccggcggactatacccgtcacacttcacgttacctgcgcgctggctgcgccagttcgtcccagccgcgctcctggggtcgctcaaccttgccaccttatgctatacctgatgcatctcattttcgggagaaaacgatgaaacgacctgactgcattcgacactggcgtgaactggaaggcgtggatgattccacctaccccgacagtactgagcttttctccatcggcgcgccgctggcgcggggcctgcggctgaatcgcctggggatccaccatgagcgtctaccgcccggacgccgaacctcttatccgcatgcggagagcgacgaagaagagtttatctacgtgctggaaggctatccggaagtgtggattaacggctacctctggaagctggagccgggggatagcgtcggctttcctgccggaaccggcatttgccacaccttcctcaataacaccgagcaggaggttcgcctgttagtcgttggcgaggcaaacaagaaatttaatcgcatctactacccgcttaaccccggctatgccgccacgcgtcaggatcgctgggttgaccatccgccgcagttttttggccctcacgacggcaagccgcggaaaatatagcgtttattgcgggataaaaaaggtgagcgctgacgctatgcctcagtggtttatctttgtgctatagtagcgcccctttttacccggatgcttatttattcgccatgatgtcagactcaacgcctactgctttcgccgctcaccgtttttccatcgcgccgatgctcgactggaccgacagacactgccgttattttctgcgtcagctgtcgcgccacacgctgctgtataccgaaatggtgaccaccggtgcgattattcacggcaagggcgactatctggcctacagcgaagaagagcatccggtcgccctgcagctcggcggcagcgatccggctgcgctggcgcactgcgcgaagctggcgcaggcgcgcggctacgatgaaattaacctgaacgttggctgcccgtccgatcgcgtgcagaacggtatgtttggtgcctgcctgatggggaacgcgcagctggtggcagactgtattaaagccatgcgcgacgtcgtgtcgatcccggtcacggtgaaaacccgtatcggcattgatgaccaggacagctacgggtttctgtgtgattttatcgaaacggtatccgtgaaaggcgagtgcgagatgtttatcatccacgcgcgcaaagcgtggctttcggggctaagccccaaagagaaccgcgagatcccgccgcttgactatccgcgcgtttaccagctgaagcgtgattttccgcatctgaccatggcgattaacggcggcattaagtcgctggaagaagcaaaacaacatcttgcgcatatggacggcgtgatggtgggccgtgaagcctatcagaatccaggcatactggcgtcggtggatcgggaaattttcggcgtggaaggcatcgatgctgacccggtttccgtggtccgggcgatgtatccctatatcgaacgcgagcttagcaacggtacttatctggggcacgtaacgcgccatatgctcgggctgtttcaggggatccccggggcgcgccagtggcgtcgctatctgagcgaaaatgcgcataaagccggggcggacatcaacgtgctggaacaggcgctgaaactggttgccgacaagcgttagtttttcactaaaacctggtcaaattcaccacgccctgtacgtatcgtgccgggcgtttttgttattattcaatatgttatatttggcacgatttttgtaatatccgctaaggtagataaaatttctttaggggaaagacgatgctggaactcttattcgttattggcttttttgtcatgttattggtcaccggcatttcactgctgggtattattgccgcgattgttgtcgcgaccgcgctgatgtttgtcggcggtctgtttgcgttaatgattaaactgctgccgtggctgctgctggccgttgttgtggtttgggtgattcgggcgataaaatcaccaaccgacaaccgttatcgcgctaataaccgctggcgctactaaggtattgagcggtatgtcacaacctgaagatttttgcataaaacagcgtaggctttgcttattaaatctgtcactattagcgggttaacgaattcatcgtgctgtaccctacatacagccgaacaaaaaaagtaagggcttcccatgtggaagccctaaacttttcttcttttcccgtcatacttcaggctacaggggcgttggttgcttgcattcaccccggtcacttactgttgtaagctcctggggattcattcacttaccatcttcctgtagcccgaattatttagggaaaagccattactatggcaagagcaaacttgaaccctgcgtcgcccggctttccagcacctcatgcgcgcgtctggcgtcggttaacgcatatttttggctctccgcgacatccacttttatcacgccgctggcgatcagcgaaaacagttcgttgctggcttccgtcagctcttcacgcgtggtgatatagccctgcagagaagggcgggtgacgtacagcgaacctttttggttgaggatcccgagattgacaccggtcaccgggccggaggagttgccgaagctcaccatcagcccccgacgctgcaggcagtcaagggaggcttcccaggtatctttcccgacggaatcgtaaaccacgtggactttcttaccgtcggtgatctctttcaggcgctcgacgatattctcttcgcgatagttaatgatctgccaggcgccggcctgtttggcgcgttcagctttttgcgcgctgccgacggtaccgatcagcttcgcgcccagcgctttggcccactgacaggcgatgagcccgacgccgccggccgccgcatgaaacaagaacggctcgcccgctttgatctcgtaggttttccgcagcaggtaatagaccgtgagccctttcaggaatgaggccgccgcctgctcgaaagagatcgcgtccggcaagatggcggccttatccgcgggcacgttgtggacggtgctataggctcccagcgccgattgcgcgtagaccacccgatcgccggctttgatatgtttcaccccgctgccgactttgcttactacgccagcggcttcggtacccagaccgctcggcaatgacgggggcgggtagaggccgctgcggatataggtatcaatgtagttaatgccgatggccttattctctacctgaatttcgtgctctgcgggatctttcggcgtgaactccagcgcttgcagaacatcaggccctccgtgctggtgaaattcaattcgtgttgccatgcttcctccagaaatgtggtaatctttcgacccattcactatctcggtaactccattcactatggcaggaaataaacccttcaacaaaccacagactgaaccccgcgagcgtgattatcagctcgatgggttgaaggtcccgccgcactcgattgaagcggaacagtcggtgttgggcggtttaatgctggataacgaacgctgggacgacgttgccgagcgggttgtttcggaagatttttatacccgtccgcatcgccatattttcaccgaaatggcgcgcctgcaggaatcgggcagcccgattgacctgattacgctcgccgaatcgctggagcgtcaggggcagctggacagcgtcggcggcttcgcctacctggcggaattatcgaaaaatacgccaagtgcggcgaacatcagcgcttatgccgatatcgtccgcgaacgtgcggtagtacgcgaaatgatctccgtggcgaatgaaatcgccgaggccggtttcgatccccagggccgcaccagcgaagatctgctcgacctcgccgaatcccgggtgtttaaaattgccgaaagccgcgcgaataaagacgaggggccgaagaatatcgccgacgtgctcgacgctaccgtggcgcgtattgaacagctcttccagcagccgcatgacggcgtgaccggggttaacaccggctatgacgatctcaataaaaaaaccgccggtcttcagccgtcggacctgattatcgtcgccgcgcgtccgtcaatgggtaagacgacttttgcgatgaacctcgtggaaaacgcggcgatgctgcaggataagccggtactcatcttcagtctcgagatgccttcggagcagattatgatgcgttctctggcctcgctgtcgcgcgttgaccagacccgcattcgtaccggccagctggatgatgaagactgggcgcgcatttccggcaccatgggaattctgctggaaaaacgtaatatctatattgatgactcctccggcctgacgccaaccgaagtgcgctcccgcgcgcggcgtatcgcccgcgagcacggcggcatcggtcttattatgatcgactacctgcagctgatgcgcgtgccgtcgctctccgataaccgtacgctggaaatcgccgaaatttcccgctcgctcaaggcgctggcgaaggagctgcaggtgccggtggtggcgctgtcgcagcttaaccgctcgctggaacagcgcgcggataagcgcccggtcaactccgacctgcgtgagtccggctccatcgagcaggacgccgacttaatcatgtttatctaccgtgatgaggtttatcacgaaaacagtgatttaaaaggcatcgctgaaattattattggtaaacagcgtaacggccctatcgggacggtgcgcctgacgtttaacggtcagtggtcgcgttttgataattatgctgggccacaatacgacgacgaataaatctccgtcatccttcatgccgcagatgcgttgactacgcctgttcaccccggtcacttagtttactaagctcccggggattctcaggcttgtcgccttcctgcaacacgaaggatttaggagattcttttattaaggaattcaaatgcaagcggcaactgtaatcattaaccgccgcgctctgcgacacaacctgcaacgtctgcgtgaactggcgcccgccagcaaactggttgcggtggtgaaagcgaacgcctacggacacggtcttcttgagaccgcgcgaacgctcccggacgccgatgcttttggcgtcgcccgtcttgaagaagccctgcgcctgcgcgcgggcggtatcccccagccgatcctgctgctggagggattctttgaggccgccgacctgccggtgatctccgcccagcgcctgcatacggcggtacacagcccggagcagctggctgcgctggaggaagcggatttacccgagccggtaaccgtatggatgaagctggacaccgggatgcatcgattaggcgttctgcccgaacaggccgaagccttttatcagcgcctgagccagtgtaaaaacgtccgccagccggtcaatatcgtgagccattttgcccgtgcggatgagcctgagtgcggcgcgaccgaacgtcagctggatatctttaccaccttcacggaagggaagccggggctgcgctcaatcgctgcatccggcggtatattgctatggccgcagtcgcacttcgactgggcgcgtccggggattattctctacggcgtatcgccgctcgacggtggatccaccggcgcggattttggctgccagccggtgatgtctctgacctccagcctgatcgcggtccgcgagcataaagccggcgagccggtgggctacggcggaacctggatcagcgagcgtgatacgcgtttaggcgttgtggcgatgggctacggtgacggctatccgcgcgccgcgccgtccggcacgccggtactggttaacggccgggaagtgccgattgtcggacgcgtagcgatggatatgatttgcgtcgatctcgggcctgaagcacaggaccacgctggcgacgcggtcgtgctgtggggcgaaggcctccccgtcgagcggattgccgaaattacaaaagtaagtgcttacgaacttattacgcgcctgacttcacgggtatccatgaagtacgtggattaatgtcagccagcgcgctttcccccggtggcggctgacgcctcatcggggctacgggccggtagcccggataaggcggtttaagccgccatccgggatgggcgttcacgttgttgcgtcaaatccagcccgttctgttttatccgccaacatcccctcgaccttctttcacatccagtttattgtgttataacgagcccatgtaaacctggagaaacatcgcgtgtttcagaaagttgacgcctacgctggcgaccccattctctccctgatggagcgttttaaagacgatccgcgtagtgacaaagtaaatctcagcatcggtctttattacaacgaagacggcatcattccgcagctgaaggcggttgccgaagcggaagcacgtcttagcgcccagccgcacggcgcctcaatctatttaccgatggaagggctgaacacctatcgccacgcgattgcgtcgctgctgttcggggccgatcatccggtactggcgcagcatcgcgtagcctctattcagacgctgggcggctccggagcgctgaaagtcggcgcagacttcctgaaacgctacttcccaggctcgcgcgtatgggtcagcgacccgacgtgggaaaaccacatcgctatatttgaaggggctggattcgaagtaagtacttacccttggtttgatgataaaaccaatggcgtgcgtttcgcggctttccttgaaaaactcaatacgctaccggaacgcgatatcgtgctgctgcatccctgctgccataacccaacgggagccgatcttaccaacgctcagtgggatcaagtggttgaggtgctgaaagcgcgtaatttgattcctttcctcgacatcgcctatcagggcttcggcgctggcatggaagaggatgcctacgctatccgcgccatagcgaacgccgggatgcccatgctggtcagcaactcgttctcgaaaatcttctccctgtacggtgagcgcgttggcgggctgtcgatcgtctgtgaagatactgaaaccgcggggcgcgtactggggcaattaaaagcgaccgtgcgtcgcaactactccagcccgccgaactttggcgcgcaggtggttgcagcggtgttgggcgacagcgcgctgaaagcctcatggctggcggaagtggaagggatgcgcacccgtattctggccatgcgtcaggagctggttgatgtgctgaaagagacggttccgggcggtgattttgactatctgctcaagcagcgcggcatgtttagctataccggtttcagcgcggcccaggttgaccgcctgcgcgatgagtttggcgtctacctgattgccagcggccgcatgtgcgtcgcggggctgaatgcaggaaacgtgcgccgcgtagctcaggcgtttgctgcggtaatataagttcttcctgaccttttgcccgcgccaaatcatgacgcgggcaattcgcttcccgaagtgtgatcattctctttttatatgacatcagagcagaaaaaccttcctatccgccttcgcggggggtaaggtctgggtgcattaataagcgtacacattattgaaaattataacgattcgattatttagggaaaaatatgcgcaagatcaccctggcctttggggccgtctgcttactgttcacgctaaatagctccgtcgttgctcgcgcctccacaccgcagccgctgtggacgggcaccaatatggcgaaactcgccgaacaggcgccgatccattgggtttccgtcgcccagattgaaaatagcctgctgggacgccagccgatggccgtcggttttgatattgatgataccgtcctgttctccagcccgggcttctggcgcgggcagaaaacctattcccccggcagcgatgattacctgaaaaatccggagttctgggaaaaaatgaacaacggctgggatgaattcagcatgccgaaagaggtggcgcgccagctgattgcgatgcacgtaaagcgcggcgatagcatctatttcgttaccggccgtagccagaccaaaaccgaaacggtatcaaaaaccctgcaggatgattttctcatcccggcggcgaatatgaacccggttatttttgccggcgataaacctggccagaacaccaaaacgcagtggctgcaggagaaagggatcaaagttttctacggcgattcagataacgatatctccgctgcccgcgaggtgggcgcgcgcgggatccgtatcttgcgggcctcaaactcttcctataagccgctgccgatggcgggcgctcagggtgaagaggtcattgtgaattcagaatattaagctgcccgccggcttaatcatcaatcgctaaaacggcagccggcacgctgccgtttttttgtgcaaaatagcgtgccaaaggttttaccttttcgcttattgctgcacacttaggaaggttcattagtaaaaggagtggtttatgtggcatcagcaaaccctgacgttaggcccgaaagcacggggcttccatctggtcactgatgaaattctcgggcaaatccgcgaaatatcgcgggtgaaaactggcctgctgcatttgctgctccagcatacatctgcttccctgacgctaaacgaaaactgcgatccgaccgttcgcttcgatatggagcagcattttctgcgcgccgtaccggataacgcgccgtatgaacacgattatgaaggtcctgatgacatgccctcgcacattaagtcgtcgatgctgggcgtatcgctgatgctgcccgtacgggatggcagcgtcaggctggggacctggcaggggatctggctcggggagcatcgtattcatggcggatcgcgccatatcatcgcgacgctgatgggggaataaaaatgacaatttcggatttattgcagtactgcatggcaaagccgggcgccgaacaaagcgtacatagcgactggaaagcgacgcagatcaaagcggcggacgtcctgtttgcgatggtaaaagaggttgaggacaaccggcctgcggtatcgttaaagaccagccctgagcttgcggaactgttgaggcagcagcatcgcgatgttcgccccagcaaacatctcaataaagcccactggagtacggtgtttcttgacggctccctgcctgattcacaaatttattatctggtggatgcttcctaccagcaggcgcttgattcgctttccgaggctaagcgtaagctgttgccatagcgctaaattctgcccagcagcgccagcagggtcacatcaaacagacgaagcagcgtggactgcagatgcgcctgcatggcgatctgttcgttgttagcgcgaatgctggcaatatcgcgctgcccttgcaggagcagaatgaggtcgtcctgacttaaccagccgcgcgctttctcctgtaacgcctgaagcgtgagcattccggcgtcgcgaatgtcgctgtcttcatcatttacaatcgcatgcataagctgcaaccactctgccgtattcacgccggcgccggccagctgggcgcttaactcttctatggtggacatgcttatctccctgaacgctgttgttcgccgttgatggcctgctggtaaagtttttccgtctgttgcgccagaattccggcctcgaaaggcatcagcgctctctcctgggggacgacgcgccggtacagccgctgataatttttctccagcacgtgaagattactctgccgtagcgcatcgctatcgcttaacgccaggctgaatagcgggcgaatctggcgatcctcgtaactgagcaagcgttggtcgagtggcgctgccgccgcgtcgctgatgaactgcagatgaagctgttcaagcatcagcaactgctgatgagccgtgctgctgtagccgtctatccagctgcaggcggtcagcgcgaataacgccgcgacgagcgtaaatcgataaagtccgtgctttaagtacatgatgcatcctgcaatttatggcggtggtgctatctgatgacagatgccgtccggccgcaaatcacaaaatatcagcgggagaaaatgagaggaaatgaggcctcttcccgggacgggaagaggcagatgagattatttcagcatgggcttgaggaagcgagccgtataggaggcctcgcactcggcgaccgtttccggcgtaccggaaacgaggatctctccgccgccgcttccgccttccggcccaaggtcaacgatccagtcagccgtcttgatgacatccaggttgtgctcaatcaccacgatggtattcccctggtcgcgcagctggtgcagaacctccagcagctgctgaatatcggcaaagtgcagaccggtggtcggttcatcaaggatatacagcgtttgcccggtaccgcgtttggacagctcccgcgccagcttgacgcgctgggcctcgccgccggagagcgtggtagccgactgaccaaggcgaatataggtcagaccgacgtccatcagcgtttgcagcttacgcgccagcgccggaaccgcatcgaagaactcacgcgcttcttcaatggtcatatccagcacttcatggatcgttttgcctttgtacttaatctccagcgtttcgcggttatagcgtttgcctttgcactggtcgcacggtacgtagatatccggcaggaagtgcatctcgactttgatcacgccatcgccctggcaggcttcacagcgaccgccgcgcacgttaaaactgaagcgcccgggcgtgtagccacgcgaacgtgattcaggtacgccggcaaacagttcacggaccggcgtaaagacgccggtgtaggttgctgggttagaacgcggcgtacggccgatggggctctggtcgatatcgatcactttgtcgaaatgttccagcccctgcacgtcgcggtaaggtgccggttccgcgatggtggcgccgttgagctgacgttgggcaatcgggaacagcgtgtcgttgatcagcgtggatttacccgacccggaaacgccggtgatacaggtgaagaggcccaccggcagcgtcagcgtcacgtctttcaggttgttgccgcgcgcgccggacagcttcagcactttctccggattggcgggtacgcgctgtttcggcacttcgattttacgcttgccgctcatgaactggccggtcagcgattccggcaccgccataatatcttccagcttgccttcagccacgacctgaccgccgtgtaccccagcccccggaccgatatcgataacgtggtcggcggcgcgaatggcgtcttcatcgtgctcaacgacaatcacggtgttgccgaggtttcgcaggtggatcagcgtgcccagcaggcgttcgttatcgcgctggtgcaggccgatagagggctcatccagtacgtacatgacgccgaccaggcctgcgccgatctggctggcgaggcggatacgctgcgcttcgccgccggagagggtttccgccgaacgggagagcgtcaggtagttcagaccgacgttgacgaggaatttcaggcgatcgccaatctctttcagtactttttcagcaatttgcgcacgctggccggagagcttcaggttgttgaagaagtccatcgcgtggccgatgctcatatccgagatggtcggcagcggggtattctccacaaacacgtgccgcgcttcgcgcttcaggcgggtcccttcacagctggtgcagggacggttgctgatgaatttcgctaactcttcacgtactgcactggattccgtctctttataacggcgctccatattgtgcagcacgccttcgaacggatggcggcgcaccgaggtatcgccgcgatcgttcatatatttgaattcaatattctctttgcctgagccgtacagaaccactttttgtacgctgctattcagcgtgccccagggcgcttccacatcgaattcataatgttccgccagcgacttcagcatctggaagtagtaaaaattgcgccgatcccagccgcgaatcgccccgccagccagcgacagctctgggttctgaatgacgcgttccggatcgaaatactgctggacgccgagaccatcgcaggtcgggcaagcgccagccgggttgttgaaggagaacaggcgcggttccagttcgcgcatgctgtagccgcaaatcgggcaggcgaagttggcggaaaacagcagctcttcggctttcggatcgtccatattggcgacgatggcggtgccgcccgacagctccagcgcggtttcaaaagactcggccaggcgcgtgctgagatcgtcgcgcaccttaaagcggtcaatcaccacttcaatggtatgtttcttctgcagctccagcttcggcggatcggagagatcgcagacctcgccgtcgatcctcgcgcggatgtagccctgcccggcgagattttccagcgttttgttatgctcgcctttgcgctctttaatgatcggcgccagcagcatcaggcgctggccttctggctgggagagcacgttatcgaccatctggctcacggtttgcgccgccagcggaacgtcgtgatccgggcagcgcggctcgccgacgcgcgcgtacagcagacgcaggtagtcgtgaatttcggtaatggtgcctaccgttgaacgggggttgtgggacgttgatttctgttcaatggaaatcgccggcgacagcccttcaatatggtcgacgtcgggcttctccatcagcgacaggaactgccgcgcgtaggcggagagcgactcaacgtagcgacgctgcccttcggcatacaacgtgtcgaaagccagtgaggatttgcctgaacccgaaagcccggtgacgacaatgagtttgtcgcgcgggatgacgaggttgatatttttgagattgtgggtgcgggcgccccgaacttcgatcttatccattcacctttcccggtagatacgcggattgcctggtttgttagaaggacaaacggcagaaacggctaattatgacacaatttaacctgtttgaatatacagtattggaatgcattttccggtgggatgtgtaaaaatgtcgcaccgcgagagttatctggaacctacttcccagctatcaacatagcacctggaaatggtacactcgcgcgtttacactattaagaaacgcattcaggagacacaaacatggccagcagaggcgtaaacaaggtgattctcgtcggtaatctgggccaggacccggaagtacgctacatgccgagtggtggcgcagttgccaacattacgctggctacttccgaatcctggcgtgataaagcgaccggtgagatgaaagagcagaccgaatggcaccgcgttgtgctgttcggcaaactggcggaagtggccggcgagtatctgcgtaaaggttctcaggtctatattgaaggccagctgcgtacccgtaaatggactgaccaatccggtcaggaaaaatacactaccgaggttgtcgttaacgttggcggcacgatgcaaatgctcggcggtcgtcagcagggcgcgggcgccccggcaggcggtggtcagcagcagggcggttggggccagcctcagcagccgcagggcggaaaccagttcagcggcggcgcgcagtctcgtccgcagcagcaggcgccggcagccccttccaatgagccgccgatggactttgatgacgatattccgttctaacgaagcgttagcgtcgtaaagtcatctctgaaaaagcccctgttcggggctttttctattttgtcacccaggccatctgcgctatttcactgcgcggcaggtgtggcaggtgtggcaggtgtggcaggtgtggcaggtgtggcaggtgtggcaggtgtggcaggtgtggcaggtgtggcaggcgtggcaggcgtggcaggtgtggctggcatccccactgtcggcacgacctgatttttggaggccgttgtcgcctgctgtttacgcgccatttcatccacgatcagccggtaagcgatgtaatacttatagatattgctgacatagcttacggtctcggagccgatcttctcggcggccaggtactccacgttgccaaaccagacgttcggatcaaaaccgcgctttttggtatccgcccgcagccgggcgatgcgcgcgggacccgcgttataagaagcgaatgagaacagcgccttatcaagctgggtcatcggttcatcgccatagtagcggtctatcatccagcgcatatatttcaccccggcatgaatattggggtcgagctgcttaatatcaccgaccttcagctccttgccggtgctcggcattacctgcataacgccaattgcgccgacgtggctacgcaccgactgatttagccgcgattcctgatagccctgcgcggccatcagcagccagtcaacatcgtagcgatcgccatatttgcggaagatctccaccatggtcagaaatttacgccgctctttttgcgccgccgcgtttttaacgtatctggcatccttcaggtagcgcagcagaatcgtattacccagcttgctgccctgacgattcttgttgatgaattcattaagcaaggccagcagctgcgggctattgttgcgtaccgcccagccgatattgccttcgttgcgcagaatgatgttctgatgaacctgaatgttggggaagacctgtttccagaacagagccttgtggcggtcgacgacggtcaatggaatcaggcccgcgttaagcatctctattagatcttcatcctccagcgcttcgggcgccggttcgatagtgatggggggcagtgattgctgggcaaagcgcgcgttgagcgcgaccaggctctcgtaatagctcgatgaggtacgcacaaagaccgttttgccggaaagctgctgcagattttccactttgggcgagccggggccggaaagaagcagctcctgaacgtgagagtagattggcgcggtaaaggtcatctcctgctggcgagcgggggtaatcgtcaggttagcggcgataatatcccccttaccggcgttaagcgcgctgatgagctggtcgcgggcaatcggaacaaagatgatacggaccttaagatgacgatgtttgagctttttctccttcatcaggctttgattgaggcttcgctcaaactccataaaaatatcgtgcgtagcgccgcgctgcgtccctttgttaataaagaaaaaggttttgctgaaggtggttaatacgcgaatggttcgccggtcgagcatacccggtaaatctcccttccatggctgcagcatatcgtcaacgttgacttccagggcctcgcgctcctcgggttctgacagtttattctctgtggcggcgtaaacggatgtgaagcatagcagggcggcaaggcatgcaagtccgccgacaaggtatcgatagaacgacgacgtattcatggcgcggtgctccgcaggaggatttccttattttagtcaatttctggccgttagcatgcccggcgatcgagaatgtcggccggttaatcagctattttattaattaacaggctcagtatttatagtggaataataaacaaatagatatcggtaattatggagagaatatgctcagattgtgtttttttagtgtggatatattttggttatttaaagtacaaataaggggtaaacgtaaataattatttcatctttttgtttttattgagttatttaaaattattgctgtgatgtataattatccacttgataataaatctcatttctaataacgttgtgtggcacaatactcctattactgctgttcggcgaatgctatcaaagaatagcgcggtgcgtttatttcttcatttttgccagagtaataaatctattttggtcgctcattatttattgctatccctatttaaacgggagggcctgactacgccaaaaaaagagatgttacgccaggcatggaagacatgaccggtgtttatctggcggatgaagaaggcgtgccccgacggctaaaaagaaaaacagggcatattccatgaaatacgattcacactactcgctggccgtgctgatcccgatggccatctggggagggatgctgccggcgcaggccgctgacagcaacacgccagacgatacgaagaaatcagaaacggctacggcaaatgatgacgaaaccatggtggtcaccgcggcggcgcagacgctgcaagcgcccggcgtatcgaccatcaccgctgaggagatccgtaaacatccgcccgcgcgcgatgtctccgagctgattcgtacccagcccggcgtcaacctcaccggcaactccaccagcggccagcgcggtaataaccgccaggtcgatattcgcggcatggggccggagaacacgctgattctggtggatggtaaaccggtgaccagccgtaattccgtgcgctatggctggcgcggcgaccgcgatacgcgcggggataccagctgggtaccggcggaaatgatcgaccatatcgacgtgattcgcggtcctgcggcggcccgctacggtaatggcgcgatgggcggggtggtaaatatcgtcaccaaaccggccaccagcgaatggcatggatcatggaatacctatatgaacgccccccagcaccgtaaagagggcgcgacgaagcggacaaacttcagcctcaacggcccgctatcggatgaggtcagctttaatttatggggaaatctgagcaaaacgcaggccgatgcccaggatattaattccggtcacgaagcggcgcgaaccggtagctatgcgggatcgtatccggctggacgcgaaggcgtagtgaataaagatatccacggtaagctgcgctgggaatttgcgccgatgcaggcgctggagtttgaaaccggctacagccgccagggcaacctgtatgcaggcgatacccagaataccaataccagcacgctggtgaaaagtatgtacggtaaagagaccaaccgcctctatcgtcagacttatggcgtcacgtggaccggcggctgggataacggcgtgaccagcaatacttacgcgcagtatgagcacacccgtaactcgcgtatgaacgagggtctggcggggggaacggaggggatcttctccagcagcgaattctccgatatcgacctgtcggatgtgctgctgcacagcgaggtgaatattccgtttaccctgggattcgagcagaatctgacgctgggtaccgagtggaaccagcagcggatgaaagatggcgtatcgaccacccagtcgctctcttatggctccattgacggtatgtcggcaaccgggcgtagcccctattccagcgccgagattttctcgctgtttaccgaagataatatcgcgctgaccgagagcaccatgctgacgccggctctgcgcttcgaccatcacagcatcgttggcaataactggagcccatcgctgaacctctcgcaggggctgtcggatgactggacgctgaagttgggcatcgcccgcgcctataaagcgccaaacctttatcagctcaacccgaactatattctctacagcaacggccagggctgctatgccagcagctcagcctgttacctgatggggaacagcgatctgaaggcggaaaccagcgttaataaagagattggccttgagtataagcacaacggctatcaggcggggctgacctggttccgtaacgactatcataacaagattgaatcgggctactcggcggtgggaacggccagcaacggcacgaccaatatttatcaatgggaaaacgtaccgaaggcgctggttgaagggctggaaggctcattaaacctgccggtaagcgaaacggtcaactggagcaacaacctgacgtggatgctgcagagtaagaacaagaccaccggcgatcgcctgtcggtgatcccgcagttcacccttaattcgatcgtcagctggcaggtacgcgacgatctttcgctgcagagtactttcacctggtatggtcggcaaaaacctaagcgcttcaactataagggcgaggcggtatccggcagcgagctgaatgaagtgagtccgtacagcatcgtcgggctcagcgctacctgggatgtgaataaaaacctgagcctgaccagcggcgtggataacctgttcgatattcgccactaccgcgccggtaacgcgcagacgacggggaattcgacgaccggcgcctatctgtatggcgcgggcgcggagacctataatgaatcgggtcggacgttttatgtcagcgtgaatacgcacttctgattatctactcaaacacccgccgggatagtgaactattccggctttttatttttatgtcggggaaaaaggccggagatataaatgatgacaaaatctccacggcttctacacaattaactcaacttagcagtttacactgtttcctgttgatcgggtctgcttgatcccggaaacgattaacggtggcatcctgccatttccattctaacgttgtgttcctcttcccccttccattcccaaccgcagcaatgcggaggagggggatcccctatccggagatacacaggattttgcgaaactggccaggcgtaatcgcatagtatcttttaaaggtacggttaaaggcgctgatatcttcatagcccgccataatacaaatatcaacgatgcgaaaagccggtttaacctttaataaatcaagggctaattgcatccgctgttggcgaatataggccattggcgacatattaaaatagtgacgaaacaggcgaaaaagatgccattcagaatagccggaaaagaggctcagcgcccgcatggtgagcctcttttcaagattgttttttatccattgcaccagctcgctaagcactgaacgctgaatttcatttcgtggcatgatatctactcatttcattataatggcaatctggctgcataatttattcactatctcttcattttatctacggggttataggttagtttgtggctgttcctggtttatcccagagagcatcattcctaacaagatctttttccccctttcaaccaatgagaaagggggctttttgttttttaattaaaaaacaaaagatgttgaattttaatgttgtcaggaaatgcttatctgactgggtggaagaaggaaagttccattaaaaaataattttttcaccattctcatatatccattttttctccattttctcgtcataattgcgtgcaattctgcgcctcgttcaggttatttaaaacggcgtcagaatctgtctggcgcaatgaactgcattattcccagcaggtatctgctattgccaaatatcttttagacgacacctccatgctaaaaaaaacgagtctcatcgccggtctattgatttcccctttaacgctttacgcatcaaccgcctatacggtagatgacattcgtttcgaagggctacagcgcgttaccgttggcgctgcgctactgagcatgcctgttcatacgggagaagaggtttctaacgaggatatcagtgattcggtccgcgccctgtacgccagcggcaactttgagaacgtgcagatcctgcgcgatggcagcacgctggtggtacaggtcacagagcggccaaccatcgctaaaatcagcttttccgggaataaatccgttaaggatgatgccctcaaggagaatctggccgccagcggtattgaagaaggcagcgcgctggatcgcaatgcgctcacggaaatagaaaaggggctccaggatttctattacagcgtcgggaaatatagcgctcaggtccatgcagtcgtcacgccgctaccgcgtaatcgcgttgatttaacctttgtctttcaggagggggtatcggcaaaaattgcgcaaattaatattattggtaaccaggcctttagcgcagaaacattgctggaccagctgcagcttcgcgacagcgttccgtggtggaacgtgattggcgataagaaataccaaaagcaaaagatggcggcggatcttgagaccattcgtagctattatctcgatcgcggctacgcgcgttttaccattaactccagtcaggtcagcattaccccggataaaaaatcgctatatatcacgatcaatcttaccgaaggcgatcgttataacgtggccagtaccgtcgtgaccggcgacatggcgcagcataaccaggaaattgaagcgctggtgaagcctttagcggggaaatggtacagcggcgcggaaatcacggcggctgagaacagcattaagacgctgctgggaaaatacggctatgcctggccgcaggttaataccgcgccggatattgatgagacgaaaaaaagcgtcgttttgcatattaacgtcaatgccggacgccgttattcggttcgtcagattcgctttgagggtaacgatacttcccgcgatgcggtgctgcgtcgcgaaatgcgccagatggaaggcgcgtggctgaatgatgagaaggtcgagcagggaaaaacgcggctggatcgtaccggattttttgaaaccgtcgacaagcagatcgttccggtaagcggtagccaggatcaggtggacgtggtctataaggtgaaggagcgcaataccggctcctttaacgttggtctgggctttggtaccgacagcggcgtgagctaccagctcggcgtcactcaggataactggctggggaccggcaatagcgtcagcttcaacggcacgcgcaacagctaccagtcctatattgagctgggagcgacgaacccttacttcaccgtggatggcgtcagcctcggcggcaaaattttctacaacagctacgacgcctcggatgccgattccggaagctacaaccagcaaagctacggcgttggcagtacgctgggattcccgattagcgagaataacgccctcaaccttggcctggactatgtccataaccgcctgaccaatatggagccggagctcaccacctggagctatcttaactcacggggcatctatcctgacgtcgtcaccaaagacggcgacagcggtgcgacctatagcgccaatgactattttgccagcgttggctggagctataacaacctcgatcgcggtttcttcccgcgcgcgggaaataaaagcagcctgaccgccaaggttaccatacccggttcggataacagctattataaagtgactttcgataccacccaatatatgccgctggccgagagcaaaagctgggtatggatggagcacctgcgcgcgggctatgccgatgggctgaacggcaaatcggtgccgttttacgataacttttatgctggcggatcgtcgtcggttcgcggtttttcgtcgaatacgattggcccaaaagcggcttattatcgttgtaatggttctgaaagcagctacagcacctgtccgctggactcatcatccgatgcggttggcggtaacgcgatggcggtgctgaacagcgagtttattgtgccgacgccgtttgtgaatgacaaatatgccgacagcctgcgaacgtcgctattcctcgacgccggtacggtatggagcacctcctggcaaaataccggccagacgctggcggccgggatcccggactatggcgatccgtcacatatccggatgtctgccgggattgcggtgcagtggatgtcgccactgggcccgctggtgttctcctgggccgaaccctttaaaaaatacgatggtgataaagccgagcagttccagtttaatattggtaaaacctggtaatcctgctgcttattatttgaaggagagctcggttatttgtggtaaatgctaaaaatagtaccgcaggctaccgctatgggtagcctgtaattaattgtcagtatattcttatttatgtatattcctgcggggaacgcttctggctattatggttaaccattcattattagaacactatatttaaggtaagccttattgagtacgggtggtattgagtattgtctgatatcacattattaatcgataaccttgcggttagctatcatggatgctatcactatatagagtcatttatcagcaatgcccgcaaggataaaaaatgaaatggactattcataatacgcttgtctgcccgtattccggcgtggctttttcttcgatttccagcctgcggtttttaaagtttattctttggtatgaagccgacattttattactgccgggagagtcgatgaagctctactcgtccagcgtgttaattaacgagcaatatcatgcggtaaaggtttataacatcacgcgatacgatgaagcccagtgggagaaactgcgggagcggccttcttgtccgtatcaatctactgccacgacggcaaacgcctgttcttaccaggcgcactgcgcaataaaacgctgcccgaacaactttccacgcgggctattgggcagtcgtccgtcggccagcggaagcgttataaccagaccataatggtgtcatcgctgcggtgtatatcggtgatgggtttaggctgtcgcagagggggaaatcgcgggtggcggtgctgtgcacctgtccgggcaaccggttcaccgccgtctggtggtccggtcagcgacatcggcgcccggataaggtgggccgacatcaggtcatcatcatcggccattcgggcggagtctggctcatgacttcaatcatcacgtccttgatattgccccagattttcgccacgtccagcagcgtaatgcctaacagaccggtggcgaaccagcaggctgcggccaggcccatacagctacaaatcaccgctaaaccggcataatcgcttttacgtagctgaatgttcaacgagctggccagaaacatcagcactgcgctcacgagtggccagcgcaaaagcacgacactggtagtaatggaagccatcaacctatcctcaacgaaatttgggagcctttgacaaccggatgagactgacgatggaacggcgctctggctatcttcaggcaaacaagatcgtaatgaaacaacgtttttgtttcatcagctaatgtgaactatatcacacttgttcttttattcaccagccaaaaatggtgttttcttgcgcttattagccatgtaaatagcagggttaatagggagggcgcggggctttcttgcaatgtgaaggctgattataagggattatcggcggtttgggttttttaataaggtttatgttctgcggattttattacttattctggctaattatacggataaaccgaatgacatagtggagctaatctcattatgttgagaatgtttctccagtggtcctataagccagtattattcataattcatcgtcatgaggtttttacgtcaaagcgtgggttgctgagatgctccgttcatatcacagtaagcagagtcatcggggctgttcaccttgattaaggcgtatcgcatggataaaaagcggaaatgaatcatagcgcgccgcataaggcgttgagaatatttggcatcgtgctggtcattctgctgccggtgctgctggcgttgtggtttgcgcaaattcgcgccaaagcggaaaccgccgatcagctgaggcttttttctcgactggcgctgcaaaaaacggagatggtgattcgtgaagccgacgaagcgcgcgataaagcccgcttgtatcagggagcgatatgttcaccacagcatcagcaatatttgctcggtattgttcgcggcctgctctatatcgacgatttaatctacgccaacggcacccatttcttctgctccacttcggttcgccgccagacggggtggcaaattccggccgcaacctataccaaaaagccggatgtcgcgatttactactaccgcgagacccctttctaccctggctatgcgatgaactatatgcagcgcggcaactatgtggtggtggttaatccgctctcatacagcgcgttgatcaccagcgaccgcgacctcgcctggggcgtttttgataccaaaacccaccagtttttttccgtcagcaagaatgccgaccccgatgagctgcatcgcctgattcgcgctgaagcgtctttatttcaccaggatggccgcgtttataccatcgcccattccaccgttcgcccgatagccgtcattatgtccacttcgcgcgtcagctattatcagaatttttataatcaggtgaccctgacgctaccgctggggctgatttgcagcgtattgctcctgctggtgtggtcgcgcacccgtcagcagtaccactctccgcggaagatgctgcagcgggcgttaaaccgtcgtcagctgtgccttcactatcaaccggttatcgatattaaaaataaccgctgcgtcggtaccgaagcattattgcgctggccaggctttgatgggccggtgatgagtccggcggagttcattccgatggcggaaaatgaagggatgatcgcccaggtcaccgactatgtcatcgatgaggtattttccgacctgggcgagtttctggcgcggcagccgcatctgtacgtggcgattaacctctccgcttccgatttccattccgcacgcttgattgagcacatcaacaagaagatccagcgctacgcggtcaaggcggaacaaatcaaaatcgaagtgaccgaacgcgggtttatcgacgtggcgaaaacgacgccggtgatccaggcgttccgcgatgcgggatatgaaatcgccatcgatgatttcggcaccggctactccaacctgcacaatcttcatgcgctcaacgtcgacgttctgaagattgataaatcttttgtcgacatgctgacgagcaataccaccagccacctgattgccgagcatattatccagatggcaaacagcctgcatttaaaaatcgtggctgaaggcgtcgaaacggcagagcaggtagcctggctccagcaacacggcgtacagtactgccaggggtggcactttgcgaaagcgatgccgccgcaggagttcatgctgtggctggcgaatgatcgcacctgcctcagcccctatcagccgcgctatcaggcagaaatttgatggcgataggcggtcggcgttcggtcaaattcgcgacggaacacccgcgaaaaggtttgctgcgacacgtagccgagatccatcgcgatatcaaaaatagggcgctgggtggttcttagcgcttccgcagcgagcagcaggcggcgctggcgaatgtaatcgcccagcgtttgatgcatcacggcgcggaacatccgctgcagataccatttcgagtatcccgattttctggcgactatatcaatgttaagtggttgatcgatatgttcatcaatccattcaataagcgtttggataatatcctgatgggacataaagcggcctctctcaattctcgattcgtcgttttgtctgcgggcgagtataattcctcaagttaacttgaggtaaagcgctttatggaaaagaaatcaccccgcatcaaaatgctgctgacgcccggcgaagtggcaaaacgaaccggcgtggctgtctccgcgctgcacttttatgaaagtaaagggctgatccacagccagcgcaacgcgggcaatcagcggcgctaccggcgcgatgtcctgcgcgcggtggcgatcattaagattgcgcaacgcattggtattccgctggcgaccatcggcgacgcgttcggcgtactgccggaagggcataacctcagcgccaaagagtggaagatgctgtcgtcccagtggcgggaggagctggaccggcgcattcataccctgaccgcgctgcgcgatcagctcgatggctgtatcggctgcggctgtctgtcgcgccgcgactgcccgttacgcaacccgggcgataagctgggtgaagaggggaccggcgcgcgattgctggaggatgactaaaaaactaaagcgccacaacagggcgctttagttgttttccggtcttggtctttcgcactatcccgctggtacgcaggagggtttcccccgacgtcggctcacctcagtattgcgcaatctttgatggaggttccggtttgcgccgacaatttaagtgtggctcttttctctgaatttgcctcttcagtttgccgaaaaattcccggcatccgccgcctgttcctatagttaatttgaacaaacagcgggagaggcccatgttaacggtacatcatctcaatcagtcacgatcgcagcgcgtgttatgggcgctggaagagctgcagctgccttatcaggttgtctcttatcagcgtggcaaggatatgctcgcaccggcggaattaaaaagcgttcatccgctgggtaaatcgccggtggttgaggataacggccacattctggcggagtccggcgccattctggaatatttacaggaaacctatgatagcgcccggcgcttaaaacctgagtcggtggaagataagctgcaatatcgcttttggctgcactacgccgaggggtcgctgatgcccctgctgctgatgaagctggtgtttgccagcctgggcaaaccgccggtgccgtttggtatgcgcacgctgggtaatgcgttgggcaagggggtacagaaggcctggcttaaccgccaggtggacacccatgcccgctttattgaagcgcacctttcccgccagcgctggtttgccggcgctgagctgagtatggccgatattcagatgagctttcccgcgatggcgctgctggcgcgcggcggcgtggagaatttaccccatctgacgcagtgggttcagcgcgtggagcagcgcccggcctggcaaaaagcggttgagcgcggggggccgttcaccttacccggcgaataaactattactaaagccgatgaccggggaaaattgctatcagcgcaatacaaaaatgttaccggattgcgcatggacgataacgtttgcgcatcggctggttatttcctgaacgtcataagcgaaatttagcgaaatacgacaaacttcagttgaaaaggcccgtctaaaggctggataatcgtttgcctttttattttgctcatcatttcctctgctggcagaggggagcaaagtcattcttcacaccgtactgtatgcgcggagttaaacgtttgctttttcgcggcccctggcgctgcgattagcacaaggagatcgcgtttagctggcagtggatggtccaccacgcattcggacgaacgataaaaattctcaggggaagttttctatgtctacgccttcagcgcgtaccggcggttcattggacgcctggtttaaaatttctgctcgcggcagcaccgtgcgtcaggaaatcgttgccggtcttaccaccttcctggcgatggtttactccgtcatcgtggtgccgggtatgctcggcaaagcgggttttccaccggctgcggtatttgtttccacctgtctggttgccggcgtcggctcgctggtgatggggctgtgggcgaacctgccgctggcgattggctgcgccatctcgctgaccgcgtttaccgcctttagcctggtactgggtcaacagatcagcattccggtcgcgctgggcgcggtgttcctgatgggtgtcctgttcaccgtgatctccgcgaccggcattcgtagctggatcctgcgtaacctgccgcagggcgtggcgcacggtacggggattggtatcggtctgttcctgctgctgattgccgccaacggcgtgggcctggttatcaaaaatccgctggatggtctgccggtggcgctgggtaattttgatagcttcccggtgattatgtcgctggtcgggctggcggtgattatcggcctcgaaaaactgaaagtgccgggcggtatcctgctgacgattatcggcatctcaattatcggcctgatcttcgatcctaacgttcacttctccggtatcttcgccatgccgtcgctgagcgacgataaaggcaactcgctgatcggtagcctggatatcgtgggcgcgctgaacccggtggtgctgccaagcgtgcttgcgctggtgatgaccgcggtgtttgacgccaccggaaccatccgcgcggtggccggccaggcgaacctgctggataaagacgggcagattattaacggcggcaaagcgctgaccaccgactccctgagcagcgtcttctccggcctggtcggggcggcaccggcggcggtgtatatcgaatccgctgccggtactgcggcgggcggcaaaacgggcctgacggcagtgaccgtcggcgtgctgttcctgctgatcctgttcctctctccgctctcgtatctggtgccggcttatgccaccgcgccggcgctgatgtacgtcggcctgctgatgctgagcaacgtggcgaaaatcgatttcaacgatttcgtcgacgcgatggcgggcctgattaccgcggtctttatcgtgctgacctgcaacatcgtgaccggcatcatgatcggctttgcgtcgctggtgatcggtcgtctggtgtccggcgaatggcgtaagctaaacctgggtacggtgatcatcgccgcggcgctggttatcttctacgccggcggttgggcgatttaacttttcctgctaacaatgggcggctttggccgcccgtttaatttttaagccacatcctgtttccttttgcgttaatctgagtagcgtattatgccgagacatgacgcctcagatgtaaaaaaaagacacgcagcaaacagggaacacatggaaatattctttaccatactcatcatgaccctcgtggtctctctctccggggtggttacacgcgtactgccctttcaggtcccactccccttgatccaaattgccatcggcgcgctgttggcctggcctaccttcggattgcacgttgaattcgaccccgaactctttctggttctgttcattccgccgctgctttttgccgatggctggaagacgccaacccgtgagttcattgagcatggacgagaaattttcggcctggcgctggcgctggtggtggtaacggtggtcggtattggctacctcatctactggattgtaccgggtattccgctgattccggcttttgctctggcggcggttctgtcgccaacggatgccgtggcgctgtcgggaattgtcggcgaagggcgcattccgaaaaaaataatggggattttgcagggcgaagcgctgatgaacgatgcctccggcctggtctccctgaagtttgccgttgcggtggcgatgggcaccatggtctttaccgtcggcggcgcgacggtggagttcttcaaggtggcggtcggcggtattctcgcgggctttgtggtcagctggctgtacgggcgctcgatgcgcttcctcagccgctggggcggcgatgaaccggcaacgcaaattgtgctgctgttcctgctgccgttcgcctcttatctgatcgcggagcatatcggcttttccggaatcctggcggcggtcgccgcggggatgaccattacgcgttccggggtgatgcgcagcgcgccgctggcgatgcgcctgcgcgccaacagcacctgggcgatgctggagttcgtgtttaacggcatggtcttcctgctgttgggcctgcagctgccggacatcctttccagctcgctggtggctgcagaagcggatcccaacgtcgaaacctggatgctgtttaccgatatcgtcctgatttatgccgccctgatgctggtgcgttttggctggctgtggacgatgcgcaaactgagccagcgtttcctgaaaaagaaaccgatggagttcggctcctggaccacgcgcgagctgctgatctcctccgtcgccggcgttcgcggggcgattacccttgccggtgtactgtcgattcctctgctgttaccggacggcaacgtcttcccggcgcgctatgagctggtgttcctcgccgccggggtgattctgttctcactgttcgtcggcgtgattgtgctgccgattctgctgcgccatatcgagtcgaccgaccatgtccagcagcgcaaagaggagcgtctggcgcgggccgccacggcggatgtggcgattgtcgcgattcagaaaatggaagagcgtctggctgcggataccaaagagaatattgataatcagctgctgaccgaggtcagttcgcgggtgattggtaacctgcgtcgtcgcgtcgatggccgcaacgatgttgaaacgtcgatgctggaggagagcctcgaacgccggttccgcctggcggcgctgcgttccgaacgcggtgagctgtaccacctgcgcgccacccggcagatcagcaacgagacgctgcagaagctgctgcacgacctcgatctgctggaagcgctgcttatcgaagatcagtaacgccgtacctgttccccgggtcaggcgttgacgccgcgacccggggacttacttcagccagaacgccttgctgcactccagccacgctcgcgcgctgtgcgacagataaacgccttcccgccaaatcatccccagctcccagcgcagatcgctctgcaacggcatccagcaaaagctctgcgggtcgaggcgctggcaaatcggctccggcaaaatcgcgatgccaatccccgcctggaccatggcggccagaaaatcccactgtccgctgcgtacggcgatgcgcggcttaacttcatgctgagcaaacagccgcatcagctgctggctgagggcgaaatcctcgttgtaaatcaccagcggatgcgcggcgagcgcctgcggcgacaatgagctgaggccctcccattgtgccgttctcggcgtcagtacgcagagcggatggctgaacagagatagcgtcgtcagaccgctggcctcatcaaccggaagcgccgtcatggctaaatccagttcgccgttgctgaccgcctgctgcacggtcaatccgccaaactcggagattttcaactcgatacccgcatagcgctggcgaaagcggctaatcggctcggccatcagcatgccgaccatcggcgggatcccgagacgcagtacgcctttgtgcagatgattaatatcgctcagctccgactccagctggtgaaattcgccaaggatggcctgcccgcgctcgaaaaccacgcgtccggtatcggtcagcagcagccggcgaccgtcgcggatcagcagcgtgcagttcagctcatcttcaaggtttttaagcatcttgctgatggtgggctgcgtgacgaaaagtttctccgccgcgcgggtaaagctttgctggcgaaccacttcgacaaaataacgcagcgttcggatatccataattattccctgagactatacctgtgatgattttaattcatttctgccgcgccgggcggctctctatactgcacgcctgtcttctttttcaggaataccgctcatggcctttgcgccagctcgcgtgacgccctttgttatgcaacgtcttcaggtaccggttcaggtcctgatctacgccggactgttcgtctgcgctgaatatttagttaactggctgcacctgccgcttccggcgaatctggtcggcatgctgatgatgctggcgctgatcgtctgccgggtcattcctttaaactgggtacgcgccggagcccgctggctgctggctgagatgctgctgtttttcgtaccggcggtggtggcggtcgtcaactacgcgcagctgctgatggtcgatggctggcgtatctttctggtgattggcttgagcactacgatggtgttgggcgccacggcatgggtggttgataaagtgtatcgctatgaagtcagcaggatgaaacatgagtgattttcagctgagcctcctgtgccttcttgtcacgctgggactctattttgccaacaagcggctttatcgccgcttccataaactgccgctgatgccgctggttttcaccccgatcctgttggtcatgatgctggtattcggccatatctcttatcaacgctatatgggggagacccactggctgctgtggctgctgggcccggcgacgatcgcctttgccgtgccggtatacgacaacatggcgattattaagcgccactggatgtcgctgacggctggcgtcactaccgcctcggttgtcgcggtgaccagttcggtgtggctggcgcgattatttaccttgcctgatgagatccagcgcagcctggcggtacgctccgttaccaccccctttgcgctggcggcagccaaaccgctgggcggccagccagatttagtcgctctgtttgtcgtggtcaccggggtattcgggatggcggtaggggatgtactgtttctgcgtctttctattcgcgagggaatggcaaaaggggccggattgggggcggcatcgcacggcgccggcaccgcacgatcctacgagcttggccctcaggagggcgtggtcgccagcctggtgatgatgctatccggagtggtgatggtgctgaccgcgccgctggtgagatgggtcatgttctgaacccctttgttattagtgaacgcatactcgctaaggtactttttccatatctcacgactatttatattcctatgaatagtcttttcatcttatcgatatgaacggttaattaaatattcgtatttgtaggataatccgatgatgccttaggtgatatccttatttgccttcctgcttaaattgtaattaaatgtttctgattgaggagggtttaatatttaagagaaatataaatataaggaataatgttttttgtgaatgttttttatgtttaacgttatgaatttatgtggttatttatgatgtatatcttgtattgattggttcagggctattattcatttgagataattcatatgcgcttgttgagtattttctctattttagatatcttacttacgtgagcttctattattgaatggattcatgtggaaattaagctcttgtatttataggttagtcatcttaaatgcaggttattcactccccatgcaccttatcagcttataccttcgctgatgtctggcttcattctctaataaaagccataaaacaattgatggattgattgttaatcttaataaacaggggaataccaatgaacttcagtaccaaaacgcttgccaaaatattagccttatctgccggctgctctctggttactctggctcaggccgcgaataccattacttttaccggtaaggtctcagataccacttgtacagcgactatcgataatggcgtttcgtctattgagatggggacctcctcagtcgccgatctggatacgaatacctacggggcggcgaagagcttttctttcactttaaccggatgccctaagaccacagaaggcggtaacgccttggccagagtgacgtttggtggcgaagcggacacgacgaatagcgattacttcaaaaaccaggcggcggaaacacccgctaccggcgttgcggtggcgatttttgataataagggtgccctgcttaagaacaatactgaaggtgcggatgtggatatttcctccggtgccgcgacgattccttttaccgttaaactggctaaatctggtacggctactcccaccaagggagcggtgcagacaaccgtaacttacaacgttacctattattaattcagcattagataaaagggaaagcttctgctttccctcactggacactaccatgaaaaaattagcttactttatctgtttttgttcctgcctgtctgtcgcgcaggccagcgtggtggtgggcggtacgcgagtgatattcgatggtacgcaaaaggcagcgacggtatctgtgcaaaataaagataacgttacaaatattgtccagtcctggatcgcagttgtggatgaggcatcaccagcaaaagattcctttattaccacccctccgctgtttcgcctgaaggccggcgaacaaggatttgtccgaatcctccgctcaggtaaaccgctgcccgaagagcgagagtctatgttttggctgaatattaaaggcatccccgctatggatagcgcgccggacaaaaatatggtgcagttcgccattaattcgcggattaaactgatttttcggccagctgcattaaaaaatgctattccggaaaagtttgccgaaaagctggagtggtctgccgaaggtagagatattaaagttaaaaatacctcaccgttgtatatgaacttttctgaaattacggttaatggtaagtcagttcctgaagcatggtttgttgcacctttttcaaccataaaaataccggtagcaaatacatccttgccagggaaaaagaaaatcacatggagcgtgatcaatgactatggaatgccgggaccaaaatataccgccatcattcaataacgttggacagaattttacatttctgttgaagagtggctacgtcgccattatttcctgctttgccacccttccgttacccactatcgctggtgagtatttcaatcctcacctattggaggtcaatgaaaccggtacaacttctgtcgacctgagctatatttcccaggaaaccgttcctccgggtgaatacaatcttgatatttatattaaccaagaatttattgcttccgagtcagtcagattcacccaacagagtgagggtaatgacgtttcttcaccctgtatcagcgtcgcgcagctgaaagcgtggtcaatcaaaacggaaaattatcccgagctcacggtcgcgggttcccgctgtgcccgactatccgcaatccctggatggggaaccacggtattactttcacaacagcgcgttgattttaacgtgcctcaggtcgcggtgatgcatcatccgcggggatatgtccctgaaagccggtggcaacagggtattaccgcggggctacttaactataatctctccgggcaaaagaccgatccgcggcacggcggcgaagcgacgtccagccagtttgtgagcctgcagccgggtttaaacgtcgggccgtggcgtttacggaactacagtaccctcaaccataatgatgacggcaaccagtgggactcggtctacagctatatttcacgtgatatccaggccctgaaaggccagctgatcctgggccagacctatacgtcatcaagcgtgttcgacagtgttagcttcaccgggctacagctgaactcagataaagagatgctgccggatagcttgaacggctttgcgccggtcattaaaggcatcgcccgcaccaccgccgacgtgacggtttatcagaacggttacagcatttataaaacaacggtcccccctggcgcgtttgagataaacgatctttacccaaccgggagcgcgggcgatctgaatgtgacggtaaaagagtccgatggcagtgaacagagctttgtggtgccttttgcttcgctggcgattttgcagcgcgagggccagatagattacgccctgagcagcggcaaaacgcgttcgggaagttccggcggaaaagaatatcacttcctgcaatctaacatcgcctggggggcatcgagcaacatcacgctgtatagtggttttcagcaactggagaacaaatacagtaatgttcttctgggggccggacttaaccttggcacgatcggcgcgctctcctttgatgcatcccagtcctgggcagatataaaagagacgccaacgtcgaatcacacgtcatccagcgaaggacaatcttatcgcgtgcgctttagcaaagatattccgcagacgggaaccaacttctccgttgccgggtaccgttattcaacccatggctattactctctgcaaaattttattgataggtcgaatgcgcatagcgggtgctgttcatcaacgggccggactaaagatcgttttgacgcttcagcttctcagattctcgcagggtatggttcactctccctctcactggtcagcgaatcttattgggataattcacgtatggagtcgttgggcgtgagctatagcaactcccttggccgcatttcctattttgttaactactcctgtagccgaaatgtacgaagcacaagccagaatagtgagcgtgctcagaccagcgataatcttgtttcactcacggtgagcgtgccttttggtgcggatatctcggccagctacaatatgaacagcagtcggatgggcgacacgacccatagcctgggtttgagcggatctgcttttgcggatcgttctctgaactggaatatgcaggagggttacaatgccagcgataaaaagacttcaggaaacgtcaatctaaactatcagggttcaaaaggtgaagtcaccgcgggatacggatatgacagctatagcgcccactataattactcgctacggggcgggatggttgctcattccggtggtgtgaccctttctcgttatcttggcgagagcgtggcgctggttgaggcgcctggcgtcagcgatgtggtagtgcgcggacagacgaatattacgaccgatgccttcggatacgccgttgtaccctttgttcgaccgtaccatgaaaataatctctctcttgatgaacagcaggtctcgggagcggaaatcgataatattgtcaaaacggtggttccgacgcgcaatgcgattgtaaaagtcaaatatgatacctggattggctataaggcgatgatgaccctgcattttaataataaagaagtcccttttggcgctattatgacattagataatgaaagccaggaatataaagaaaaacgcagcgctatcgtcggtgattccggacaggcctatctgaccgggctgcctgaaaaaggtcggttgtttgtgaagtggggtgatagccaaaatagccaatgctatgtggactatgatttatcagtcaataaatcggttgatgatatcattttttatgcagcggattgccgctgatgaatagctggataattgccttaatagataaactcaggatggaagcgatgaggataagcaatggcgggatattaacgaagtcgtacgggttatttatcatcagtattggctttgcatcgatatccattaatcccgcctgggcctatgatacgtcgagtagcgtcaattttaatatcaccggtaaaattgaagagcccgtatgcgaggtctcggttaaaccctccagcgcgatcgatctgggtaccgtatcttatcaaaagcttaccaacaaaccgggcgcgagcagtgatgccacgaccgtgtccattgcctttgataattgttcaacgggtacggcgtcagtgacgataacgtttagcggtaattcatttgacagtacttactccagtatttatgagaatgagctaattgacggcgcaaaaggcgttgggctacagctgctaagcgcggtagatcagaaatccctgggaccaaacgacagctatacctatctttttaatgagggtgcagaacctatttttaatatgagtgccagaatgtatacgccgaatggacgagtcacggcgggaaatgtcgcctatacggtcacttttaatgtgtcatataagtgagccgttctcgcgagggagaggtatgaaaaagtctattttattgttgttagcctgcttactaccggcttacagttgggcatgtaaaacgggggcaaactcgggcgatatcgctttaactaatttgcccgcgcagatactggttaatgcgggtagctactcggcggggaccatcctttatgattcaggacagataacgcatccaaccacatctcttacggattgtcggggttggttatatgcactgttcgggtggagctcggggaatgcgggcaccttagtgggggataacatctactcgacctccgtgcagggtatcggtattcgcgtcaaattctggctcaatatcacgggtgaatatggcggtgataccgatgattttaatgctgactacagcgttcaccatatcggtgatgaagacttatatctgggaaaaccaaatggctttcttgatgacaaggcaagcacatattatgccccaacgtaccaggtccagcttgtggcaacggggggggcaattgccagtaatagcacgctgacgctggccgatccgatttccacggtctccattctggatcttgacggaacgatggctatttcccagctgcacgtgacgggttcgacaaaaattaaactgacccctatgggatgctcggttgattcgaccgcgctgaatttccaaatgggctcagtgaaaacaagtgagtttaatgtttctaacaaggtcggatcggttcagcaaacgcttaccctaacctgtgagccgggaactgccgtgacgatgcgcgttacggcgacagaagcagaaggtgataatcccgatcattccgtgattgcgttaacacccggcgaaaacgtagcgaccggcgttggggtacagttgaatcttaataatgcacccctcatcgtgaattattttaactacaaagtatttggaaccacaaaaagaacggaggtaacgaattctggcgcggaggccagctatttgatcttcaccgatcctgataatcccggcggtgcggcggcatcgaacgtcctgacgtttaccgcgaactattacaaaaccggagctaaagtgacgccaggtatcgcgaatgcgagcggaacgataacctttacttatcaataaaatattccccaatcggtaagccgggaaaagagagatgaatgcgccgtattagcttcagcgggctacagcagctatgacagtgtagcagaaaggccatgagccaaacgacagctatacctgttttttcattgaaggttctgagcctattttaaatatggcaggcgggaatattttcgccgaatggacgagtaacggcgaggaatatctcctggacggtcacttttaatgtgtcatataaatgatacgacttttgcgggttttatatgaaaaaaatttttttacttgttctttttttaattttcccgggttatgtgtgggcctgtggctatggattaaattatggtgatgtatcaatcactaatttaccatccaagctattgcttagcgcaggtaattattctcctgggaccgttatttatgattcagggaaaatataccatcccaaaaccagtgttctcgactgtaccggtagtttatatgcccgctttacatggtcacctggcatagcgactacgcttgtcggtaataacatctatgaaacgtcggtgccgggaataggtatcagagttaacgtatggttaaatactacgggggaatatgatggtgtttcatctgtatttaatgtcgataacagtgaacaccatattggtgatgctgattttcctcttgtcaaaccgggcttttttgctttcagtgccagtacgaattattcccctgtctatcagttacagctcgttgctacaggcggaagcattgccagtaatagttctctaagctttaccgacccggtatcaaccgtagcaatgaaagacagcaacggcgaattggttatttctcagctgcatatcagcgggacaacccatattcagctcgttcctatgggatgtaccgccagtacggccgcactgaatttccaaatgggctcagtgaaaacaagcgagtttaatgtttctaacaaagtcggttcagttcatcaaacgctcaccctaacctgtgagccaggtaccttcgtgacgatgcgcgttacggcaacagaagcggaaggggataatcccggtcattccgtgattgcattaacaccgggtgaaaatgtagcgaccggcgttggggtgcagttgaacatctttgacacggcgcttgccgtgaataactcaatctacagagtgtttgcagagtcgaaaagaactacggtaacgaattcagaagcggaggccagctattcgatattcaccgatcctgataatcccggcggggcggaggcatcgaacaccttgacctttaccgcgaactattacaaatacggaaccgaagtgacgccgggtgaagccaatgcgagcggaacgctgacttttagctacaactaatgcatcaacactaccccggccagcaggccggggtacgggcaatcattaatgcgcctgacctttctcgatgccgataccggtctgcgaacggataaactgggcgcggaacagctcgcgttcgcgcgcgccttccgcggagctatcggtggcggagaagaaccagataccgataaaggccacggcgatagagaacagcgccggatattcatacgggaatatcgccttttcgtgaccgaggatctgcacccagatggtcgggccgaggatcatcagaatcaccgcggtcagcagacccagccagccgccaatcatcgccccgcgggtggtcagcttcgaccagtacatcgacagcaggataatcgggaagttacagctggcggcgatggagaacgcgaggccgaccataaaggcgatgttctgattctcgaacaggatgcccagcagaatcgccaccacgccgaggatcagcacggtaatcttcgacaccttcagctcctgacgctcggtcgctcctttacggaacacgttcgcatacaggtcgtgagagaccgccgacgcgcccgccagcgttaatcctgcgaccaccgccagaatagtggcgaaggccacggcggagataaagccgaggaacagattaccgccgaccgcgtccgccagatgcaccgccgccatattgttaccgccgataagctgaccggccgcgtctttgaacgccggattcgcccccaccagcatgatggcgccgaagccgatgataaaggtcagaatatagaagtagcccataaagccggtggcgtagaacacgctcttacgcgcttctttggcgtcgctcacggtgaagaaacgcatcagaatatgcggcagacccgcggtgccgaacatcagcccgaggccgagcgacagcgccgatatcgggtctttcaccagtccgccggggctcattatcgccgagcctttcgggtggaccgccatcgcttcggtgaacagattattgaagctgaagccgacgtgcttcatcaccataaaggccataaagctggcgccgaacagcagcaggaccgctttgataatctgcacccaggtggtggcgagcatgccgccaaagaggacgtaaagcaccatcagcacgccgaccagcaccaccgcaacgtggtagttgaggccgaacagcagctggataagcttacccgcaccgaccatctgggctatcaaatagagcgccaccaccaccagcgaaccacaggcggagagggtgcggatcggcccctgtttaagacgataggacgctacgtcggcaaacgtgtagcgcccgaggttacgcaggcgttcggcgataagaaacagaataatcggccagccgacgaggaaaccgagcgagtagatcagcccatcgtagccggaggtgtaaaccagcgcggaaatgccgaggaacgaggccgccgacataaaatcgccggcaatcgccaacccgttctggaaaccggtgatattgccgcccgcggtgtagtaatcgctgcgcgaacgtacgcgttttgaggcccaccaggtgatatagagcgtcagggcgacgaaaatcaggaacatgataatcgcctgccagttggtcggctggcgctgtaccgcgccggtgagagcatctgcggcattgacggtcaacgggagcgtggcggcgagcgccgtcaggactttcttcatgatgctttaacctcgctgagaatgcttttcgtcatccgatcaaattcaccatttgcccgccagacgtatattccggttaagacgaaagagataacgatcacgccgataccaatcggaataccccgggtgacgctggttcccgcatgcagcggcgtgcccagccagccgggggcgaaggcgataagcagaataaagcccacataaatcaccagcataatcagtgacaggatggcggcaaacctttgccgggctgcaacaagctccttaaaatgcgcactattttctatccgctgacaaatctgttcgttcatcgtagcgtctccagaggttccctttcgtcattcacgcgccggtcgtcggcaacactcatccgcccggcagttaactgtcgggaatcagcctgtttaccgctttcctgctacctgaaatccttggggagtcgtaattatatcctctcccctggtggggagagggtgtaggggatcgttggtttacgatggcatagcgatggcctgcttctcttcgagcagtttttccaccacgccaggatcggcaagcgttgaggtatcgccgaggttactggtatcgcccgcggcaattttgcgcagaatgcggcgcatgattttgcccgaacgggttttcggtaacgaatcggtccagtgcagcacgtccggcgtcgccagcgggccaatctctttacgtacccagttgcgcacctcggcgtacagctccggcgtcggctcttcgccatggttgagggtcacgtaggcgtagatggcctgccctttaatgttatgcggaatgccgaccactgccgcttcggcgattttcggatgcgacaccagcgccgattcaatttcggcggtacccagacggtggccggaaacgttcagcacgtcatcgacgcggccggtgatccagtagtagccatcttcgtcacggcgcgcgccgtcgccgctgaagtacatatttttaaaggtggagaagtaggtttgttcgaagcgttcgtggtcgccaaacagcgtgcgcgcctggcccggccaggagtcggcgatcgccaggttcccctcggtcgcgccttccagcggcgtgccttcgttatccaccagcaccggctggacgccgaagaagggacgcgtggcggaaccggccttcagctcgatggcgccgggcagcggggtgatcataaagccgccggtttcggtctgccaccaggtgtccatcaccgggcacttctcgttgccgatcttcttccagtaccactcccaggcttccgggttaatcggttcgccgacggagccgagaatgcgcagggaagagcggtcggtgccttcgatggccttatcgccctccgccatcagcgcgcggatcgccgtaggggcggtataaagaatgttgacctgatgcttatcgaccacctggcacatacgcgccggggtcggccagttcggtaccccttcgaacatcagcgtcgtcgcgccgcaggccagcgggccgtagagcaggtagctatggccggtgacccaaccgacgtcggcggtgcaccagtagatgtcgcccggatgatagtcgaacacgtatttaaaggttgacgccgcatagaccaggtagccgccggtggtgtgcagcacgccttttggcttaccggtcgaaccggaggtataaaggataaacagcggatcttcggcgttcatctcttcgggctggtgttccgcgctggctttttcgatcagatcgctccaccacagatcgcggccttcctgccagtcgattttgccgccggtacgtttgaacaccaccacgttttcgatgctcttcacgtgcggattttttagcgcgtcgtcgacgttcttcttcagcgggatcgcgcggccggcgcgcagcccttcatccgaggtgatcaccaggcgagagttggaatcgatgatacggccggcgaccgcctccggcgagaagccgccgaaaatgaccgaatggatagcgccgatacgcgcgcaggccagcatggccaccgccgcttccggcaccatcggcatatagatagccacgacatcgccctttttaatgcccagatcgagcaggacgttggcaaagcggcagacatcgcgatgtagctcgcgataagtgatgtttttgctctggctggcatcgtcgccttcccagatgatggccgtctggtcgccgcgctccgccagatggcgatcgaggcagttagcggcgaggttcagcgtaccgtcttcataccacttaatggaaatattgcccggcgcgaacgaggtgtttttcacgcgcgtatagggttttatccagtcaaggattttgccctgctcgccccagaaggcgtcaggttcggtgacggactgctgatactgcgcctggtactgttccgggttaatcaggcaacgttccgcaatattagcgggaatagagtgtttatgtatttggctcatggctttttttctcctgtaggttgttaaatatatgtcaaataaacgttaatagtaggggctttggcggctttgtttgctatttggggggcagatcacgcaataattaaattgaatgaaaagcaatcaaatgaaactttgatatgaaataatttctgaattgaatttatagaaaatgaatatattaaatattttttataacaaatacttatgcaacataaggtggggatattagcgggtttatgcataaaaccagagtaaaccgctgttcttaaagacttgcgcagcatgccgtgcaaatgatactgatattgcgcgttaaataaccctataaagcaacgcaacacaattcatacccctttcagtgggtgccattacctcccggaatggcgcttttcatcgaggaagtctgtagtgaagaaaaaaacaaaagtcagcctggcctggcaaattttgctggctctggtgctgggcatacttctgggcagttacctgcattaccatgccgaaagccgtgactggttaatctcaaacctgctgaccccggcaggcgatatctttatccatctgattaaaatgatcgtcgtaccgatcgtcatctcgaccctggtggtcggtattgcgggcgtgggcgatgcgaagcagctgggccgtatcggtgcgaagaccattatctattttgaagtgatcaccacggtggcgatcgtgctggggattaccctggctaacgtcttccagccggggagcggaatcgatatgtcgcagctggcggcggtggatatttcgaaatatcaaaacaccacggcggaagtgcagagccacgcgcatggcctgatgggcacgatcctctcgctggtcccgaccaatatcgtggcctcgatggcgaaaggcgacatgctgccgatcatcttcttctcggtgctgtttggtctgggcctctcctcgctgcctgccacccaccgcgaaccgctggtaacggtgttccgctctatctctgaaaccatgttcaaagtgacgcacatggtcatgcgctatgcgccggtgggcgtgttcgcgctgatttcggtgaccgtggcgaccttcggcttcgcctcgctgtggccgctggcgaagctggtgattctgctttatttcgccattctgttctttgcgctggtggtattaggcatcgtggcgcgggtgtgcggactgagcatctggaccctgatccgcattctgaaggatgagctgattctggcctactctaccgccagctccgagagcgtgctgccgcggattattgagaagatggaagcctatggcgcgccggcgtcaatcaccagcttcgtggtgccgaccggctactcctttaacctcgatggctcaacgctgtatcagagcattgcggcgatctttattgcccagctgtacggtatcgacctctccatctggcaggaaattacccttgtgctgacgctgatggtgacgtcgaaagggattgccggcgtaccgggcgtctccttcgtggtgctgctggcgacgctgggcagcgtgggcattccgctggaaggtctggcgtttatcgccggcgttgaccgtatcctcgatatggcgcgtaccgcgctgaacgtggtgggcaacgcgctggcggtgctggttatcgccaaatgggaacacaagtttgaccgcaaaaaagcgctggcgtacgagcgtgaagtgctgggaaaatttgataaaacggcgcaataaaacagaaagcccggtgacatcgcaccgggctttttcttatcttttactgatcctgtcgaactcttcacagccggtatcaaacccctcctgacagctgacgttgagccagtgcagcgctttctgcttgttgggttcgataaagcctttttccccctgctggaaaagcatcccggcccagtattcagcgtagccggtgcgggagagggcagagctctctttaaaatactgcgtcgcctttacgtcatcttccgggggatgaacgccgctggcgtagatcagccccagcagcatctgggcgtcgacggctgaatcgctttccggagcctgggcggcatgctgtaacagggagatggcgtgcggatagttcggcgtaccggcctgctggttcaccagcacccgggcgaggacaatttctcccgccctgctgccggtctgcaccgacttttccgccagcgctttcgcttggcggtagtcggcctgctgcggattgcggattttgagctgagccagcagcgccagcgcatcgccgtcgcccttgtctgccgctttctgcgcccagtattcagcctgcggaaaatcgccgaagctgacgtaagtgtcggccaggtagtactgcgcgcgcgggtcgcccgcttcggccagcggtttgtactggctgccgggttccatggcgcctgcggcgacgcttgccatcaccagcagtaaatagaggtatttcattttttattatcggtagaggacatagcgagcagtataaaggcaggtgaaggagaagaaaacgacgggaacgagtgggggatactcatggtttatccgaataatcgtgccgtctgtttccccgggggcggcgctgacgcgccttgcccgggctacggattgtgtagccaggacaggtgcgaagcaccgcctccggggaggcggcctgattagcccatcgcgctttcgcgcaggcgggttttcagcttattgtactcgtcaatcacgtactgctcggcggcccgctggtcggcaatcggctcaacgttgacggcgcagtacttatactccggcgttttggttatcgggctcaggttctcggaaaccagctcgttacaggcgccaatccaccactggtaggtcatatagaccgcccctttatttggacgatcgctgacctgcgcgcgggtgataatacggcccttacgcgagttcacccacaccagcgcctcatcctcaatgcccagacgttcggcatcggcggtattgatctgcgcatagcccggttcatccgccagcgcggccagcgccgcacagttgccggtcatcgaacggcacgagtagtggccgacttcgcgcaccgtcgacagcaccatcgggtattcgtcggtgagtttgtcaatcggcgcgacccagtcgcaggtgaagaactgcgccagaccgttcggggtatcgaacttctctttaaacagataagaggtcccctggtcggcgtcggactcatcgcggcacggccacatgacgtagcccagctcgcccattttctcgtaggtggcgccgtagaaatccgggcacagatgacgcaactcgtcccagatttcctgagtgttgttgtagtgcatcttgtagcccatccgggtggcgatttcgctgatgatctgccagtcggttttcaggtcccacttcggctctaccgctttaaagaagcgctggaagccgcggtccgctgcggtataaacgccttcgtgctcgccccacgaggtggagggcaggataacgtcggccgctgaggcggttttggtcatgaaaatatcctggacgataaccagttccagatcgtcgaaagccttacgcacggcggacagctcggcgtcggtctggagcggatcttcccccatgatgtacgccgcccgcacttcgccatgcgccgcgcggtgcggcagctcgctgatgcggtagccggtgtgcgccggcaggctgtcgacgccccaggctttggcgaacttctcgcggttttccgggaacttaacgtactgatagcccggataggtatccggcagcgcgcccatgtcgcaggcgccctgaacgttgttctggccgcgcaccgggttgacgccgacgctcggcttgccgaggttgccggtgaggatcgccaggctggtcagcgaacgtacggtctccacgccctggtagaactgggtgacgcccatgccccacaggatggcggcggatttcgcgctggcgtacatgcgggcgcaggcgcggatctcctgggcactcacgccggtaatctcttccaccgactccggcgtatagccttcgacgattttgcgatactcttcgaagccttcggaacggctggcgacgaaggatttatcgtagagatcctcttcgatgatcacgtgcccgatagcgttgagcagcgcgatattcgagccgttcttcagcgcaatgtgcatatcggcgatgcgcgcggtttcgattttacgcggatcgcagacgatgattttcgccccattgcgtttggcgttaatcacgtgattcgccacaatagggtgtgaatctgccgggttatacccgaagataaacacgagatcggtgttgtcgatctcggtgatggcattactcatagcgccgttaccgaccgattggtgcagacctgcaaccgatgggccgtgtcagacgcgagcgcagcagtcgacgttattggtaccaataacggcgcgcgcgaatttttgcatcacatagttggtttcgttacccgtcccgcgggacgaaccggtagtctgaatcgcgtccgggccatacttctctttaatggcgctgaggcgagtggcgacgtaatcgagcgcctcatcccaggagacggattccagcttgccgccgcgctggcgacggatcatcggggttttcaggcgcggggtaaggatctgggtatcgttaatgaagtcccagccataatagcctttcagacacagggttccctggttggttttcccctgtgccgcctccgcccgaacgattttgccgttatcgaccaccaggttgattttgcaacctgatgcgcaatacgggcaaaccgtgacgacttttttcatcggtcttgctccagttaatcaattggcgcatacgcgctatcgcgccgtcactatgcatcttctatgccatgttttcactgtgggtattgactgatgatacgtcgtttttttgggcgaaatgctgacgaaaaacaggctatcgtcagttttgacgtgtcgacgcgggcgcctgtgacgcggccgggtagcccggccaggcgcgcagcaccgccgccgagggggcgggaagaggcaggtccgggcttatgggcgttacctcggctagcttaaataccggcttctcgccagcgccgccgcgccctgagcgccgttaaacgcggaagaggaggcggcgataaagcgtacggcctgatacggcagcggacggcggacgtaggttttgaccatggcgatgacggcttcacgcgggaaggcgggcatatccattactccgccgccgaggatcaccgcatcggggtcgaacaggttgatgctggtggcgatggcgcgtgcggcgtggtttagcagctgctgcacaaacggctcccgcgcggcgtgaacgaacagctcgcccagttcataggcgcgcggctgctgttcataccagcgctttagcgcaatcccggagcagacggtttccagacaggcggggttgccgcaggcgcagatgagggcgtcatccccttgcggaatatgtcccagctcgcccgccacgccgtgggcgccggtccacggtccgccgttcagccagaccgcgaagcccataccggtgccaagataggccgccagcacctcctgctcctgcaggccgttctgctgcacatcaaaagagagctgcagattcacatcgcgggaaaactccaccgggcagcccagcgccgcttccagccggtcggccagattatacaggtcggcggcggccagcggcagattgggcgttgagataatcgtccgcttgtcttttgccaccagcgccggaaaccccatcaccagcccgcagcagtgggcgtcgtgctgggtcagctgctgctgcagcaggtttttaataccgttgaccaggccgtcggcgctaatcacgtcggcggtgcgccgcttttcgcagtgcagcgcttcgccctgcgccgtttgcaggcaaagccggatatgggtcgcgcccatatctacgcccgcgacgacgttacgctgtttttgcatgaggcagtacctcgcgttttgccgtcaggatctgctctgccatgatctgccacgcgtcttctatcttatcggcgtgattgaagaggcctgaggtgccgacgataaagacgtccgcgcccgccgccatcagtttttgataggtggctttattgcaggagccgtcgatctcgatctcgtagctcagcccctcgcgctcgcgccaggctttcagttcggcgattttttccagcatctccgggataaacggctgcccggcgaagccaggatcgacggtcatcaccgtgattttgtcggctttatgaatgtagtacttcatggtctcaaccggggtttccgggttaaggatcagtccgaccttcatgccttggcgacggatctcttcgatcaggcggaaggcctggccattaatcgtttccggatgcagggtgataaaatccgcccccgcctgcgccagctggctaatgtagtcctgcgggcgggtgaccatcagatggcagtccagcggtttgctggccagctttttgacctggctgacgaaaaacggcgacagggtcaggtttggtacaaaatgaccgtccataatgtcgatgtgaaaatagtctgcgtgctggtcgataaactcgatctgttctttaaatttcagcagatccatacacattaaagagggagcaattttcatgataaattccttacttactgataagacggtcgagggcgacagccgcgatgattaatccgcccattaccaccagctggtagtaggtttgtacttgcaggatgttcagtccgttgttgatagtgccgataatcaggccgccgatgaccaccgagaagatgcgtcctttaccgccgaagaagctggtgccgccaatgatggcgctggcgatggcgtaggtttcaaagcccatgccggccagcggttccgccgccccgaggcgggcggtggagaccacgcccgccagcccggcgcaaacgccggaaatgatgaacaccagcagcatgtggaacttgacgtcgatgccggagtagaaagcggagtgcttgttaccgcccagcgcgtagatgttgcggcccacgcgcatacgggtggtcaggaaccacaggatcaccgccacaatcagcgagaagatcaccggaaccggaatacccagcggcgtggcggcgaaaaagttaacgaaatcaaacgaaaacccgtacaccgagttggcatcagagatcaccagcgtaataccgcggaagatggcgttggtgccgagggtaataatgaacggatgcaggccggtccagttgaccaggcagccgttgatggcccccagcgcgccgccgaccagcacgccgccaatcagcgccgcgaagaacgggtcgacgcccgccagcatcagcttcgcggtgaccatcccggagagcgcgaggatcgccccgaccgacaggtcgatcccggcgacgaggatcgcgaagaactcgcccatgccgatcaggacggtgaccgaactctggacgaagatctgcgtaatattgttggtcgtcaggaagtactctgacgacagggtgccgaagatggcgacgatgatggcgagaataaaaaaggtgccgtatttatcccagaacagcgcgaagttaaacggttttttctcgcccatctcgcctttcactcttgtggtagtgcccatgccataatctcctcttcgctcatgtcgtcgcgattggtcaggatttgcgtcagtcgcccttcgcagaacacggcaatgcggtcgcagacggcgataatttcaggtagttcggatgacaccatcaggatgacttttccgtcatcggccagctggcgcatcactttataaatttcggcttttgcgcccacgtcgataccgcgcgtcggctcgtcaaaaatgatcacttcggggctgcagcacagccatttggaaatcagcaccttctgctggttgccgccggagagctcggtgatgttttgatcgaccgaatggcacttcagcgccagcagcttgcgctgctcctccgccgttctgcgttcgtcgccttcgcggaacagccccatggcccctttgtagccgccgcgcttcaggctctggctgaccgccatattctgggcgatggaaaaattggggaaaaagccgttttcccggcggctttcggtgatataccccatgcctttctttaaggcgtcgagcggcgagcggggcgagatcgccttgccgttgaggtatatttcaccgctgctacgcttatcgactccaaacaggcagtccatcagctcggtgcgcccggagccgaccagcccggcaaaaccgagaatttcgccgcgattcacgctaaatgagatatcgcgtacctttttcttgtcatggctggtgacgtttttcacttcgaacaccgtctcgcgggcgatgttgccggtgctctctttcatggcgttgaagcggttttgcagctcgcggccgaccatcaggcgtacgatgtcgtcgttattcacttcgctgaccttcccgctgcagacgctgctgccgtctttcatcaccgtgtagcggtcgcagatgcggcgtatttccgccagcttgtgcgagatataaacaatggcggtgccctctttacgcagctggttcatgatcaggaacagatagtccacctctttattggtcagcgaggaggtcggttcatccatgatcagcactttagcgtcgagcatcagcgtcttggcgatctccagcatctgcttgtggctgatggagagattcgccaccttttcgtctaaatcgatcttcagcccgacgcgcagcagcatcatcgccgcccgtacgcgcatttccttccagtcgataacgttgacgccgcagacttttttcgtcagatggcggccaatatataaattctccagcaccgttaattcatcaatgacgctgagctcctggtaaataataccaatgccgagctgggccgctaatttatggtcaagcttgtggtagttcacgttattaatcgtaatggtgcctttggtcggttcatgtattcccgacaatactttcatcagcgttgatttaccggcaccgttttcccctagtaacgcatgtatttcatgggggtaaatagttaaatcaaccgattttaatgcgtgaaccgggccaaaggatttgccgatccccgccattgaaatatatggcgtgagcatagaaaatttcctttattaccgctgcgtgatttcccctcttccaaagaaagaggggatgcacagacctatttcgtcaccagaatggaatccaccagcgtaaactgcggggctttatccagcgggatgactttgccgctcttctcggcgtcgaccatcagcttaagacccgtagcgccaatatccgccgggttctgcgcgatagtggcggtcatttgcccggcttcgaccattttgcgcgcttccggaataccgtcggtacccaccaccagcacattgccggttttgccggcgttcgcgacggcctgggcgacgcccattgccatggtgtcgttggcgcagtaaatcgctttaacgttcgggttacgctgcagcacgttcgtggcgacgtccagcgctttgatgcggtcccagtcggcaggctggctggccaccagcttgatctggctcgcttttttgaaggcgtcggtggcgccgctgcggcgagcttcgccggaggcgttaccggctttgccttcgataatagcgacttcgccgccttcagcacccagtttgtcgatgataaattccgcgcctttcgcccccaccgccacgttatcggtggtgacgaaagcctcgacgttgccgccggctttcttcaggttatccatatcgattttttcatcgaggttgaccagaaagatgccctttttccacgctttggctaccggcatgaccaggtttaccgaggagagcggcgcaaaggcgatacctttgtagtttttgttgctcaggtcttcaaacagctgcagctgcgactgaaaatccccttcggaaggcgaggcaaaaatatcgacgcttacgcccagcgttttggcttcgtcctcaataccctttttcatatccacccaaaatggattggataaggtttttaataccacagcataatcggcggcggcaaaggcgctggtggataacattacgcccatgagcgtgccgctgaaaagtttcagatatttattcatggcagtattctcagtgtaggatacagttatattgatcccaccagtgtgggatcggttttttatttaagcgcgccgggtgaaaagaaattaacaatcgcgccagttttttgcatatttaaattcgcttgctcaatgttgagctgtgcaacggaaacaaaaaacgcatctaataatgtgagttgtaatatacgcgctgaggcgttacgccctaataaaggcgtctctggtgctggcgaacaaataataaaatcagctaacttggcaatcggcgaatggtagctatgggtgatacagataattttcgccccgttctttttcgccagctccaccgctgatttgatatcgctggtgcgcccggagtgcgagaccaccagcacgacatcgccttccttcagcagcgaggcggacatcatcatgatatgcgcgtccgggtaggcctggcagcgcacgccgatgcgtaaaaacttatgctgcacgtcggcgcagatggcgttggagccgcccgcgccgtacaggtcgcgctggttggcctgggcaaaaaagcgcgccgcgcggtgaatttcgtcaacgttcacgatcgactggccttccataatggtgcgcagggtgatgttgaacaccttattcaccacatcctgcggcgcatcatcaaaggagagttcggtcggtaacacctgttcagactgcgaaaagtaggcctccagcgcgctgcgcaggttacgaaaaccgctaaaccccagcagcttagaaaccttaacgatcatggcttctgataccgacagcgcttccgcgacgtccttgattgccggcgcatcgctgagattgccgggggtaagcaaccattcgacgatacggctctcgttttcggtcatcccttcctgcttcatgcgaagccagggggcaaggccgatgccgttagggagcgaactggattctgtctgactcatcgctttctcattgtccataaaatgaagacgacactatatcaccacaggcgaaacaaaaaagataccaccaacttcacaaaattatattttttataaagttatgcttatcgtgaagttttgttaatgttgattttatctttatttcttataaattcattataaatcagtgtgttattgttttatttcagttctttttttgcaaggtgaaaatcaggttaaatatcgctttcgtcttgatttgtaaaatttgtccgtgtagaaaggagcctgacgatgctgttttcagcgttttctggggcatttttaggcgtttaaatcacaacgccagtcatccttgtaaagttaacaacaggcgaggctaagtatgaaaaggattgcatttggctgcgatcacgtcgggataatcctgaaagacgatattcttgcgcatctgcgccagcgcggcattgacgtcgtagataaaggcgcatggtccacggaacgtaccgactatccgcgctatgccagcgccgtcgctcaggccgttgccgccggcgaggtcgacggcgggatcctgatctgcggcaccggcgtcggcatctctatcgccgccaataagcacccgggtattcgtgcggtggtgtgcagcgagccctactcggcgcagctttcacgacagcataacgacaccaatattctggcctttggcgcgcgggtgatcggccttgaactggcgaaaatgatcgtcgatgcctggctgactgccgaatttgagggcggacgacatcaggggcgagtggacgccatcggcgcgattgaacagcagcggatttgagattcctccgctactcccggcgatagcccttgattaacgtagagccagccccccgatgagactggctttatgaaacgttactctaccgctttgcttatctgcaccttgtccctcgccggccagctggcgcacgccgatatgattgatgacgcgatcggcaatattcagcaggccattaatgatgcttatcatccgggcgatagccggtctgacgatgatgatgggcgctatcaggacagccgccagcagagcgccgatcgccagcggcagtatgacgaccggcggcggcagcttgaggatcgccgacgcgaacttgacgagcgccagcgccagcttgatcgggaccgccgtcagttggaaagcgaccagcgcaggctggatgatgattattgatacggcacgacccgcggctttcgccgcgcccgcttaatccagcgctatctccatgccgtcaaatcccgcttcaaatcccgccggtagagcattctccatcatccacgcatcgaagcggtggctgatatgggtgaggatcacccgcgggcagccgatgacctggttaatggcccgcacggtgttcaggtcgcagtggttgcgcggcggctgcgggcgcggctcgtggctacagtcgataatgataagctgcggctggttattcagcaggaacttcagcgttttctccggcagcgcggcggtatcggatagccaggcgacccggctgtgggccgactccagcagatagccaaacgtgagccttgagtggttcagcggcagcggcgtaacgcgcaatccctgaagttcaaatcttacaaagggttcgacggtatggctgaaatccagcaggcccggatgcttaaacagatcatcgcagccctgttcatccggggggccgtataccgcaataggttcgcccacgccccagcgcagcgggaacaggccttgaacgtgatccatatgataatgggtgagcagaaactgctgaaagctgccggcgggccactgcgtcatcagatccggtagcccggcatcgagcagggtcaccgcgttgttgaatttgacgaccgcgctacagggacggcgacgatgcgcttcgtcgacgcgggcgcggcggcaggcggggcagtcgcagccgaaaaccggtaccagctgcgcgccgccggtgccggttaagcggatagtcaggctcatctcttctcctcgcgttcaggcagtctgctgttcgcgccggttgccgtgaatacgaatcagcgaaaccagggcatccaccgactggctaagtcggccatcgttattcagcgtcagacactcgttcggcgtatagcgcgccgcgcgcgccaggcgctgggcgatttccgtctcgttctcccgtccgcgctgctccaggcgctgtcgcagcaccgccggagaaacctgcagacagatgggcagcagtgcgtcggcatagcgcgcctgcgcctgcggcagatgggcgcgtgaaccgttagcgaccacgtcgaacccggcgtgcagccacaggtcaatctcgatgccaatgccatagtaattgttgttagcataccagctaagagcaaacagatgctgttcggcgcgggtaaaaaactcatgttcgctgagggcgatatggttttcacagcccgcgttgtgtggacgggttatgtagcggtgcgccaccagcagctgcggatgctcccgctggcgcagagccgccagcaggctgtctttgccggagccggaggggccgaccagccaaatcagtttccctgtcatcagaagaccctcttgccttgccgccagacgtgatcgatatggatatgctcgccgtgacggcgcgccagcaccaggtccgcccgcttaccttcggcaatcgccccgcggtcgtgcagccccagcgcctgggccgggtttttgctcaccagacgaatggcctgcgcgagggtaaaggcgttgccctcgtcgtcggcgatgcgaaaagcggcatccagcaggctggcgggataatagtcggaggagagaatgtccagcaggccgctggccgccagatggtgggcggcgacgttccccgagtgcgagccgccgcgtacgatattcggcgcgcccatcagaacgttcatcccgtgctggcgcgacgcctgcgctgcggcgatcgtggtgggaaattcggcgatgacgctgccaagctggcgcgattcgagcacatgttcgcaggtggcgtcatcgtggctggccagcgcgatattccgttcgcgacagatggcggcgatgcgctgccggttaggctgagaccaggccgccgccagagccatctgctcctcttcgaatttgtccatctcttcgttggtcaggtgatatttgccctgatagtagtcgcggtatttgctgcggtcggcatactggcgctggccaggggagtgatccatcagggagaccatgctcaccggctcgcggccaaccagcttctcaaacagcggcagggtggtgtgatgcggcagttcgcagcgcagatgcagccgatgttcagcgcggttgaggccgcgcttctgcgtctcttccacggcgttgatcattttttcgagattttccaggcgatcgccgccgtcgcgcacatcgccaatagccacggcatccagcacggtggtgatgccgctggcgaccatcagcgcgtcgtggctgctcatcgccgagtgggcgggccagtccactttcggtcgcggggtgaaaaacttgtccaggttgtcggtatgcagctcgataagccccggcagcagccagccgccctctccatcgatggcctccgccagtcggctctggctttcggcaaaggccgaaattctgccgtcctgcacttccagcgagccgttaatcacctcgtcttcgagaaccagctttacgttattgataatcatgctgaaatccccatcgggtgcagacggtcggcgacctggttgcgcgtggcctcgtcgtgaaaaataccgacgatcgccgcgccgcgggctttggcttcatggatcagttccaccaccgcggcgctatttttgccgtccagcgaggcggtgggttcgtcgagaagcaaaatcgggtagtcgaccgcgaagccgcgggcgatgttaacccgctgctgttcgccgccggaaaaggtcgagggggcgaggtgccacaggcgttcgggtacgttcagccgcgttagcaggcgggcggcttttgcggcgctctcttcgcgcgggatgcccagttcgagcagcggctgcatcaccacgtcgagggcggaaatgcgcgggatcacccgcagaaactggctgacccagccaatggtggttttgcgcacttccagcactttacgcggcgtggcggtgaccaggtccacccattcatcgccgtggcgaatatgaatgtggccgctatcggggagatagttggcgtacagcgaacgcagcagggtcgattttccgctaccggaatggccgtgcagcaccacgcattcaccggcattcacggtcagcgaggcgtcggcgagtaccggcagacggacgccgtgctgctggtgcagaacaaaggttttatggatgttttcaacgcggatggcgttcatttttagcctcatcgtgcctgaatttccccggatcgcggcgtgaacgccttatccgggctacctgatgcattaactcacgaagcgcgaccggggagtcccggaggcggcgcgttgcgcctgtccgggctaccggcttgcagacggcccgggatccgtagccccggtaagcgcagcgccaccggggagtggacattcactcagttctgcaacaccgacgacaccagcagctgggtataggggtgatggggatcgtcgagcacccggtcggttaagccgctttcgactacctggccctgcttcatcaccagcagacggttagccagcaggcgggcgacgccgaggtcgtgggtcacaatcaccaccgccaggttcagctcgacgaccaggccgcgcagcagatcgagcaggcgcgcctgcaccgatacgtccagcccgccggtaggctcatccataaacaccagcctcggctgcgtcaccagattgcgggcgatttgcaggcgctgctgcatcccgccggaaaaggtggtgggcaggtcgtcaatgcgcgaaggcgggatctccacctcctgcagccactgcccggcggtggcgcgaatattgccgtagtgacgggacccggtggccatcaggcgttcgccgatattgccgccggccgagacctggcggcgcaggccgtccatcggatgctgatgcaccacgccccattcggtgcgcagcagacgtcggcgctccgcttcgctcatggcgtatagcgagcgctgttgatacagcacttctccctgctgcggggccaggcgggcggagatcgctttcagcagcgtggtttttccggagccggattcgccgacgatacccagcacctcccccggccacagctcaaacgagacgtcgctgaagcctttgcccggcgcgtagaggtgggtcaggttgttcaccgccagtaacggatgactcattttttctgctcctcgctctgttggcggcaataatcggtatcggagcagacaaacatccgtttgccgctgtcgtcgagcaccacttcatcaagatagctatggcgagatccgcagatggcgcagggttcatcccactcctgaacggtaaacggatgatcgtcgaaatcgaggctctcaaccggggtatacggcggtaccgcgtagatgcgtttttcgcgtccggcgccgaacagctgtagcgcaggcatcatatgcatcttcggattatcgaattttggaatcggcgacggatccatcacgtagcggccgttgaccttcaccgggtaggcgtaggtggtggcgatatggccgaagcgggcaatatcttcgtacagcttcacctgcatcacgccgtactcctccagcgcgtgcatggtgcgggtttcggtttcgcgcggctcgataaagcgcagcggctccgggatcggcacctggaagatcaggatctgatcgtcagtcagcggcgtttccgggatccggtggcgggtctggatcagcgtggcgtcttcggtgcgctcggtggtcgcgacgccggtcacgcgtttgaaaaactgacgaatcgataccgcgttggtggtgtcgtcggcgccctgatcgatcaccttcaggacgtcattttccccgatgatgctggcggtaagctggataccgccggttccccacccgtagggcataggcatctcgcgaccgccgaagggtacctggtagccggggatggccaccgctttcaggatggcgcggcggatcatgcgtttggtttgctcgtcgagataagcaaagttatagccggtcagtgcgttagccacgttgattctcccgttgcaggcgtttaagcagcgccagttcggcctggaaatcgacatagtggggaagtttaaggtgcgaaacgaaaccggcggcctcgacgttatcggcatgggccagcacaaactcttcatcctgggcagggcccgccacctcttcgccgtactccggcgcctggagcgcgcggtcaaccagcgccatcgccatcgctttgcgctcgctcatgccgaacgtcaggccgtagccgcgggtaaagtgcggcggttcatcctgagggtcgacaaagccgttgaccatctcgcattcggtcatcagcagttcgccgatagtgacggtgaagcccagctcttcgggtgcgatctccaccgcgacgtagccgctgcgaatttcaccggcaaacggatggttgcgtccgtagccgcgctgggtggagtaggccagcgccagcaggtagccctcgtcgccgcgcaccagctgctgcaggcgcgaagagcgcgaacagggataaaccggcggatggcgggtgatatcgtcgggctgcgcgtcggtatcccgctccgctttcgccagcccctgctggacgagcagattaaagacgtgcggcgtcgcttcctgcggtgcgctatcggtcgccagcggcggcgtttcgccgttggccagcagggtaaaatcgagcagacggtgggtgtaatcgtaggtcgggccgagcatctggccgccggggatatctttatagaccgccgagatacggcgctcaaggcgcataccggcggtgtcgacaggctcgctgaccgccagcctttgcagggtggtgcgataagcgcgcagcagaaaaatcgcttcgacgctgtcgccgctggcctgcttcagcgccagcgccgccagctcccggtcggcgatgccgccttcggtcatgacccggtccaccgccagattaagctgttggctaatctgatcaacgctgatttcaggaagccgtccctcgcctcggcgtttctgttcctgtagggcgtgagcggcgacgatcgccttctcgccgcctttgacggctacgtacattagcagacctcgacatgggtggtgcgcggaatcgccagcaggcgttcgccgcaggtgaggatcagatcgattcccagcgggaacggatgcggacgctcggtcaattcttcaataatgcattccggcagctgcggggcgatcatccgctcttcggcgatccccgcgccggtcagccgcagcatccggccgccgctcaggctggcaagctgaaccaccagcgtgacgccggtttccggggcgacgacggtaccggcggaaagcacgttcagctgctcggcgctgatgctgtcgctggcgacggcgaaggtcgcctgctgcggctgctcaaccagcggcgcgccggtatgaaagcgcagattctggccgacaagatcgttatgcagcgcgggagcgagccagaccggcgtgtcgtgatccaccagcgtcagcagcaggctggtggaggcgacgttcagcggctgccagccgtgctgaagctgctggagggagacaatcactcccggctcgctcatcgccttcagcaggcggcggaaactgtgctgggcatcctgcacagccagggtaaaggcgggttgtaatgtcatgcgttatctccgcgaaccagagtaaagaagtcgacccggctggcgttgacttcggcgcgccgggcttcaatgcgcgcgctgcgttgttcttccagcggggttatcagggtttccatcagggtgtgaaaatggtgtggcgactgcatcagggcatcaatggccgcgcagcgttcagcgtgcgggcggtcgcggcccagaatccagctatagccgagggtgccgtcggccaggcgaatggcggcgcgggttaaggtggcgtctccggcgaagaatcggtcgccgatgccgcccatacgcgcctgcagctgcaccagcccggtctccggggcgcgaatcagctcatactgcggcgcgagctgcagcgtctgcatccgcgccgccagttcttgtggttcactgtgggccagcacggacatccagcgctggcgggttgcggtatcaaagtgcattcagtgctccatggtgaattcaatcatgtcggcgcgggtcaggctgacggagtactctgtcgcgctctgctcgccctggcgatgattcagggtgcgcacgcacagcagcggcgccatgttgggaatgccgagaatattgctctctttggcctgcgcgcgtcgggcgctgattttggtgcgcacgcgggtcagttcgatatcaagccgatcgcgcagcaggtcatggagagagccgtgggtaaaggtttgtagaaccggccacagcttcaggtcggtaaagtagtggtcgatcagacacagggcgacgccgttcacgcggcgcagggtgcgcaggtgaatgacgttatcgccttcactgatagcaaacgcctcggcaacgtggctgctggccggacgcaccaccgacagcagcttctcgctggttgggtggctgccctgttcgagaagattctggctaaagcgggcctgggcgttgagcggataatctatcgggcgcatcagcaccagcacgccgacgccctgacggcgctggacccagccgcgttcgacgagctgatcgatggcccggcgcagggtgtggcggttaacctcaaagcgggacgccagctgctgctcggcgggcagatagtcgccgcagcggtaatgatggcgaagctcttgctccagtttggcggcaatttcctgatatcgcgttggataactggtcggatgtctggataagtacatgtcaatcgagcctcactaaggacaaggaagtatttccctctgagcgtgggccgatcctgacggttttttgttacatttcggttaacccatgatgaccgggggatgaagagttgatgccggtggaatgacagggtaagggggagtgaatgcacagatgccctcactccgccctctctccctttcggggggagcacagggtgcagcgttaaggctctttcaccacgttgaccatccacgggacgccaaagcggtcgataactttaccgaagccgtgcgcccagaaggtttcctgccaggccatctcaatctgcccgccgtcggcgaggccgtcaaaccagcgtttaccctcaataacatcctgcgagtccagcacgacggtaaatccggcgtagcgctccatgttgctggaggggctgtcgctgagcatcaggatactatcggcaatgcgcaggctggcgtgcgcgataccgtcggcagccagatgctggccggaagggcagccatcttcggcgtcctgcgtattctgcggcatttcaccccaggtgattttgtggatgagctccgcgcccagcgcctgctggtagaaagcgatggcggcagcgcagttgccgctaaaagcgatatagggacttaagggcataaccattacctcaggtaacgaatattccattaagcgtagaaggggattgcagaattaagctaggcggcagcgagggattccgggaggccatgggaaaatatatttccccccgacaacgggcgtcgggggaataaaatcagttctttttaacaaattcggattttagcttcatcgggccaaaaccatctattttacagtcaatattatgatcgccttcaaccaggcggatattcttcactttagtgccgatttttagcatcgaagagctgcctttaaccttcagatcttttaccacggtgacgctgtcgccgtcggcgagtaaattaccgttggcgtctttgaccaccagcgcgtcgttatcgtccgcaggctcggcattgttccattcgtgggcgcattccgggcagataaacatgccgccgtcttcataagtgtattcagaatggcattttgggcagtgtggcagttgcatgacgttcctcgcgattactgggtaaaacaggacgttggtcctttaaatggtggctgatagccgaaagtaatgctgattatagcgcaatcccgcacttttgtcgggccttttttatgacttatcgcagcggagaaagaggatatatatcgtgaggcctggcgggcttattttcataaaaagcgcaggatatttgcggaaatgtatcgctaagttccaatattcattgaacttattgcttttggatgactctgtttaagggtaggtaaatttttgtgaagttgatcccaaatttaaacgctgttagggtaaaaaggcgagaacgcaaattcactacacttattagcggtaccgcttatttcattatggccagagcaggcgtcaacaggttcggttgtacggactgtcagcagacagtgcaggcaaacctgctacgcttgaaatgtggagcacagcaattcgccgctcccaacgcatgacgcgaatgaccttgtcattcggcggagattcgtgcgctcaaggcgagagcaaaagaggataattatgcttaaaaggaaaaagtaaaacccatcacgcttcgggatgtgaccatcattgatgatagcaaactgaagaaagcgattaccgcagcgtcgctgggtaacgcgatggagtggttcgattttggggtatatggttttgttgcatatgcgcttggtaaggtctttttccccgatgccaaccccagcgtgcagatgattgccgcgctcggtactttctcggttcccttcttaattcgtccattaggcggcctgttcttcgggatgctgggcgacaaatacggtcgacaaaagattctggcgataaccatcgttatcatgtcgataagtacattctgtatcggccttattccgtcgtatgccacgattggtatctgggcgccgatcctgttgctgctgtgtaaaatggcgcagggcttctcggtgggcggcgaatataccggtgcctctatctttgttgcagagtactcgcctgaccgtaaacgcggctttatgggcagttggctggacttcggttcgatagccggttttgtcatgggcgcgggcgtagtcgtgctgatttccagcgtggtgggcgaagagaacttcctcgactggggctggcgtattccgttcttcctggcgctgccgttagggattatcggactttatctgcgtcatgcgctggaagagacgccggcgttccagcagcacgttgataaaatggagcagggcgaccgcgagggcctgcaggatgggccgaaagtctctttcaaagagattgcgaccaaacactggcgtagcctgctaacctgtatcggtctggtgatttccaccaacgtgacctactacatgttgctgacctatatgccgagctacctgtcgcataacctgcactattctgaagaccacggggtgctgatcatcatcgccatcatggtcgggatgctgttcgttcagccggttatcggtatgctcagcgaccgttttggccgtcgtccgttcatcctgattggtagcgtggcgctgttcgggctgtcgattccggcctttatcatgattaacagtaacgtccttggcctgattttcgccggtctgctgttgctggcggtggtgctgaactgctttatcggggtgatggcctcgtcgctgccggcgatgttcccgacccacatccgctttagcgccctggccagcgcctttaacatctcggtgctgattgccggtctgacgccgactctggcggcgtggctggtggaaagcacgcagaacctgatgatgccggcttactatctgatggtggtggcgttgattggtctgattaccggcctgtcgatgaaagagaccgccaatcgtccgctgaaaggggcgacgccagcggcttcggatattcaggaagcgaaagaaattctcggcgagcactacgataacatcgaacataaaatcgaagatatcgatcaggaaatcgccgacctgcaggaaaaacgttctcgtctggtgcagcagcatccgcgcatcaacgactaaatcgttttgccagtaattcatgccgccgcgggcttcccccggcggcattttttatgtcctgagcggctacgggcttgaggtcattcgaggaccgcccaggcccggtaaggaccgggcggtgccacaggaagagagcgggctacggcttagctatgggtcagaaagcgcgccagccgctgctgcagaatttgattttcgcggctcaggcgcgcgttctcgtccagcagcgttaaggccacagcaatgcccggccagtccagctccagctctttgcgcaggcgtacggcgcggtgaacgatggtcaccgcgctatcgtcaaacagccagttttcccgctgcggctggcgcggctcgatcatgccgaggccaacaatctcgttaagctcatcttcggaaaggccggtgtggagacaaaactcggtaatcgtgaacgtcactgttatcttagccatcaggctttcccccatgtcttacgcggctcgaagctggattgtgcatccgccagctgctgccagagctcacggctcttctcatctggttttggcggcatgacgatttttatcaccgcatacaggtcgccggtggtggttttgctggtcagccctttgcccttcacccgcagccgctgaccggcctggctgcccggcggaatggtcagcaggatgctctctttcagcgtcgggatagtgaccctggtgcctagcgctgcttcccacggcgccagcggcaggacgatttcaaggttgtgtccgacgatatcaaacagcggatgcggggcgatatgaatcaccagccacaggtcgccgttagggccgccattttcgccgggggtgccctggcctttcaggcggatccgctggccgtcgacgacgcccgcgggaattttcacgttcagggttttcggcgtttcgctttcgaccatgccaaagacgttataaaccggcagcttatagctgatggtgcgcgtctgctcggccagggtctcctcaaggaataccgcgacttctatctctaagtcatgaccgcggacgccgtgctggcggcggctatggtgcgcctgctggccaaacatggaggagaagatgtcgtcgaagtcctgctggctatagctctgctcgtgggaatgctgctgctgacggccaaactgcggatcgttacggtgctgccagagctggtcgtattcggcgcggcgctggtcatctttaagcacttcccaggcttcggcgagatctttgaatttggcttcggcatcgttttctttgctgacatcggggtggtatttacgtgccagacggcgataggcggtcttaatggttttcagatcgtccgttggctgaacccctaaaatggcataataatcctttaattccatggttttatctcatttatgcgcaatattatggttacagatccctggatcaggtgtctttactaagcgtagggcaaatgagggcggatgtgggggaaaaatggcgcaaacttgacgccgtcgggattgacggcggccaagcgtgaacgccagctattcgctggagcgcctgcggtttctgcgcaacccttccagcagcacaagggcggcgccaatggctccgcccatcacggggagcgcggcgggcgcgttggggaacagatgaacgatggtcacatcggtcaccatcatggaaccggctatccagccgatgagcgccccgcccagcatcaccacggacgggaagcggttgaggatagccagcaccagcttgctgccgaggacgataatcggaatgctgatcaatacgcccagcgcgaccagcagcagatggccttttcctgcggcggccaccgccagcacgttatccagcgacattatgacatcggcaacggtaatggtgaccgcggtacgccacaggctgctggagctgctgacatcattctcttcttcctgattggtcaccagcttgatgccaatccacagtagcatcagcgcgccgactactttaagccacggcaatgagagtaaatagatcgcgatagctaaaagcagcacgcgcgccgctattgcgccgacggtaccgatgataatcgctttggtacgctgctgaggcggcagtttacggcaggccatcgcgatcaccaccgcgttgtcgccacccaataacagatcgatagcaataatttgcagcagaataaccgccacgtcccactgactgaaaaacgcattcatacccaactcatcgaaccaaaaaagagaacctacggaaaaacgcaggggcgaagcgtactctcgttagggcaccctggccaccttacagagagaccgcgcgcagcgagtgattgaaaaatatcgttaccaatcattgcatggtccggcaatgattcgcaggcaaaggatgatattttgttcgtagaaatacatctgccgttcacctatcgcaaggactaactacatgcccggccataagaatttactcacatttgcctttatcggcgctaccctgtttccgcttatggcgaccgctgctgatgcgccgacttttacgcctgaacaagaggcccgtattggcaaaatcgccgcggattacttagtcgcgcatccggaagtgctgctgcaggccagccagaagctacagcaaattcagcaacagcagcaggccagcgccgcgacccaggcggtactgaagaatgcggccgcgctgacccaggataaaaatacgccaacctacggcccgaaagagggcaaagtcacggtcattgaattctttgattatcagtgcgtttactgcagtcgtctggcgccggtaatggagcaggtgattaaagagaatccgcagacccgctttgcctttaaagagtggccgatctttggcagccgttgggaaacctcgcttgaagcggccaaaatcggcctgcagatttatcagcagaagggcgcagaggcttatctgacctaccataacgggatctattccaccggacataacgaaggcaagctgacggctgccgacatccagcagcaggcgaagaaagtgaatttcgacgcgaagaaagcggcggacgttgagccggtactggaaagcaccaatcagctggcgcaggaaattggcctgagcgggacgccgggcgttatcgtgatgccgactaccggcgccacggaagcgacgatcaccgtattcccggggctggcggataaagcctcgctggatgcggcgatcaagaaagcgggcggctgataatcaacgcgtccgccggacggcgggcgcgatttagcgatgacagcagcgctgcagcatcgacataatgacctgaaagagctcatctttagcctgctgctccgtgatgacgccgttcactaccgcggccgatagcccgtcggcggagccgagcatggcgagaatggccgcctcgctgagattctcactctcgcaaagcggcgaaaaatagtcccgacattttccggtaaaggtggcgatgcactcttgtttgatcttctccagctctggcgtcccggccagcgcggccatgacgctgggcatctcgcgcccctgaagcagcacgcactcgatataggcgttggcgatcgccgaggccagcttctccgcattcggttcggtattgcgcagtatctcatccattcgcgccgtctggcgttgatcgtattcgcgataaagcatcgcgaaaagccctgaacggctgtcgaagtgatcgtaaaccacgggtttcgtcacgcccgcctgcgtcgccagataacccaacgtcagagcatcggtcccttcttgccgaataatatgccaggcgacatcaatcagctgcttgcgccgctcttctcgcgttaaacgctgacgtacgagtggttcagacatggaaacattctcccgttgacatattaatataccaacagtaacttactgatggtaagttactgttggtatataaggctacgtccaatatcgttatagcgcaactggggtatccgtcatgcatgcattaatcgtggtttctcatcctctcaagacgtcgctgactcacagcgtagcgacggcgattgcgcaaggaattgccgaatccggcccgcagcatacggctgacatagcggatttaacgcaggaaggctttaacccggtatttgccgagccggatatcgccgcatttctgcaaaccggcggcacgccgcccgacgtgatggccgagcaggccagaattgataacgccgacgcgctggtgctggtttttcccgtttactggtggtcgatgcctgggctgttaaagggctgggttgaccgcgtgttttcaaacggctgggcctatgaggagaccgccgacggcgatgtcgtgaagaagctgggccgcctgcgggtgcatctggtggcattaggcgcagcgagtcaacaaacgtatgacaagcacgggtttaccgatgcttttcatgcgcagattgtccacgggatttttgattactgcggggcgacggtagccagttcgcagatgctgctgttgcctgacctgaaaacggcggaggcgcatctggaggcggggcgccagctgggaagaaagatgtttgtctgaaacagaaaagcaaaaacacgccttttgggcgggttctttaaatagtggtgcccggactcggactaacgccgcaggcgttgaacagcgcgcttgccgcgctggccccgaaggggtgagccgctgtgcggcgaataatcgaacggagttcgatggagagtccggccgcagaaaagcaaaaacccagccataggctgggttctctgaatagtggtgcccggactcggactaacgctgcaggcgttgaacagcgcgcttgtcgcgctggccccgaaggggtgagccgctgtgcggcgaataatcgaacggagttcgatggagagtccggccgcagaaaagcaaaaacccagccataggctgggttctctgaataagtggtgcccggactcggaatcgaaccaaggacacggggattttcaatcccctgctctaccgactgagctatccgggcaacggggcgcattaaaccgtaatccgtacgcggcgtcaatcaaatttctcgatttatctactggttgcttaagtttacggcaattctgcacctgaagacgcttttttgctgaaaattacatcataccgttgtcgccttcacggattttccagccgctggtcaccgagatagcgcggcgtaatccggagatcgcgtagtcgccaacaatgtcttcgtcatcgcgcggcgagctgatcgtgatttccgcatcgacgccgtgacgataggcgccgtggtggctaaagatggtgccgataaaacatttatcgttcagccagaccgggatatatgccacggtttcatagatatagttcgacgctactccgctatagtagttttccgcgtcgtcggatgatgtgcccggaggaatagggcaaattggcgcgtcattgtcgctctgtggcttatccttgagcaggctgctctgcatcacttccagcgacttcagcaggtctgacttctcccgctcattcagcgcaggcgtcagaggctggtctttttccggcgagcgaatgtcgttaagggtgtagcgatagcggattgtcactgccggcgtactgcctgaggggccaaacgggcgcaacagatagagattgtcttcgccaaactggccgttgtaccagagtgcgtaaacctggccgttaatgcgcacccagtgactccactggttggcgccgcggccgttgagagaatagagcgcgcccggaacgcctgcgtcaaaatcatcgccattgccgctatcatcgctgttaaccgcagcaaaagcgtcgtcgctgcgttttagtatcccggtatagctaaagagtccggtgccgccaacgtagctgtcgataattaaatcgcgtttaccgtctccgtcgaggtcgaccagcgtaaagctcactttaccgttttcggagtcggcgctgatatcggactggagaaacgcctgccactcatcatcgctgatatcggcggacggtttcgtcgtcgataccagagagtcgtccgcgtaggtcagcgtaaaatggctgacgttcccgctgagggggaactgctcggcgatattattcagatccagttcaggattggccttctgctcctttaatacggcgttatacagcgctttcagcgcgttgttatcggcatctttctgctgcttcgggataacctggctcacaaaggtgggcagcatccacgcgccgccgggggcgatctcccggcaatcgccggtggtgtatttcaggctctggacaaacgttttgccatcccagacgcgctcttcaccgctgatgcagtcggcgatgccgcggcctttattgaaaaaggtgagcacgccgtcggcatagctggaggcgtcggtggtgaccagctgaggctgggtcataaacgccttgtcgaccacccacgttgcatagccgtcgttgtaggcagcgcgccagcacagcgcctgaatcagcgtgtggcttttatccaacggcgttgcggtgatctggcgctcagatgccgggatatccgcgttttgccagtcgtcgcaatggctgtttagcagagggacgagctggggacggagtttctgccgctgcttcgccgtcagcgctacggtggcggcattgtggatgaccggcgcggcgataatttccggcgcgggcgcggctgacaaaatattctcatcaccggcgtcgccctggcgtaacagcgcatcggcagtgcccaggcgctgctgaaactcatccattttcaggaatacggcgctgctgcccgcgtcggagagcgttttacgctcgccgttaagggcaagctcaattttgccgttgtgctccagggcctgaatcagggccgccgtttgggtgtcgtcaaagcgaaagtggctctcgtcggcggcctcaagtggaccgttatcccgatcgtcaatgaacagatttaccgttgcgtcaggggggatatcgcgttcggtttgcgcgaaagtcgccacagcgatgacgtgctgcgccgcgcccgcattgcgggtcagcagaacgctgacttcgcccatggtggcgccatagccggcggctcggcaggtcccggtgttgtcgcaggcgagctcccagtctttgtgcgcgaaagaaaagccttgcggagaagctgccaggagcggtgtcgaacacagccccatgatggcaacccaaagaagagagcgcatatcaaaccctgtcagcatatcgatgaggaggggattatatgcgcgatgaattggttaagatatcggaatcaggtcagggcgccgcccatacggcactgggcaaaacgcaaaatgtcttctgccaggcgacgcgcggtatcgacatccgtctggctgcgcttgatcagcagtcggctcaggcagccttcaacgatcagctccatctgctttgcgaccattgccggatcgtcaacttcgagcttgctaagcagttcatgggtataggccagcgaagcctgcttttgctgctcggccagctgatggatcggatgctgagggtccggataaaaagtacaggcggcaataaacaggcagccgggataacgatggttgcttacgcaggtggtcagcgcggcgtagcgggccagcagtttctgctccgcgctgagcgactcgtccagtaaaagctggcggcgccaggcatcgacctgatggctgagatagcgaagcgcgtcgtacagcagcgcttcctggtcaggccagaaacgtttgaggtcattgagcgggtaagccacgcgctcggcgaccatttccagcgtggtgttagcgataccctcgatttcgaggatttggatggcttcacccaagacatcttcacgttgcacggtcttttcctccattattcctcctacagtgtcgctcacggttgtcgatcgcgcaaatgggcgctgaatgccgcggcatccataaagccggtgacgcgctgcgcgggctgctcctcgccctgttcattgaaaaacagaatggtgggcaagccgagcacctggaggtgcttcagcagcgccgcgtcccgcgcgctatttttggtgacatcaacctgcagcagaacggtctctttcagggcctgttgaacctcaggtgaggtaaaggtgtatttctcgaactctttgcaggccacgcaccagtcggcgtacaggtcgagcatcactggtttgcctttcgcctgcgccagcgcctgattgagctcatcgacgctatggatacgggtaaactggagatgggactgccgctgcgcgaccggcgcatcgaaagcccagtcctgcagcggacgggcgctgaccagcgcggcgccgagcatcactatttgcacgatacgcagccaggggcgcgtgccgcccagcgaggtaataaacgcccaactaaaaaaggcgacgccaagcagcgaccaaagccgcaggccccacgattcgcccacgatacgctcgagtaaaaataccggcagcgccaggatcacaaagccaaaggcggttttgacgtgggccatccacgggccgcttttcggcagcagacggttaccgaatacggtcaccaggatcagcggcagccccataccgagcgcgtagaggtacagggtaccgccgcccagccacagattaccgctctgggcgatatagagcagaatggcgctcagcggcgcggtggtgcagggcgagcagattaatccggcaatcgcccccatggcgaatacgccgccgggtgaaccgccctggcgtttattgctcatcagcgtcaggcgcgtttgcagcgacgaaggcagctggagcgtaaacagaccaaacatcgacagcgccagcaggataaacagcaccgacaggccgatcagcacataagggtgctgcagcgccgcctggaactgcaggcccgcagcggcaacgaccagccccagggcggtgtaggtcagggccataccctggacgtagataaaggccagcagcagcgcgcgggcggtggagaggcgtttttgaccgcccagcacgatgccggaaatcagcggatacatcggcagaacgcagggggtaaacgcgatgccgataccaatcaagagcgcccacagcgcgctaaaggggagagcggcatctttattgtccacagcggggggcggaaggtcagacggcgactctaccggcagcgccgggcgcgtttccagcggcagaggcggggtcagcccgggttgcccgacggcggcatcgctgctggagcgcgcgagcgcgttgccgagcggcacgattttggtttccggcggatagcagaaaccggcatccgcgcatccctgataagtcacggtaagagtcgcgccggcggcggcgtgagtcagagtgaccggcacggtcaggcgctggcggtaaatttcgcttttaccgtaaaactcgtcctcatgccattcgcctgcaggcagcgaggggtcggtaaacgccgcatcggcggacgtcagctttatctgtttacggtaaagatagtaaccatccttgatttgccaggtcagattaagatcgtgttgattctgctgaaaatcgaaggcaaaagcctggtcagcaggaacaaagttcgagcggccaggggcgtcgaacaggccggcaatggccgatgtgctgcaaagcagcaggatcagcgtaatgatgcgttgagccatgagaggtaatcgttgtctccgtgaataacgggcagaaccagaagttcaggggtttgatacgggtgatgggacttcaggcagtccagcagcgcctgctgatgggcaaggtcggttttcagcagcatttgcacttcatactcctgctccagttttccttcccagtagtagagcgatgtcgctcccggcaggagagtggcgcaggcggcgagtttttccgccagcgctttggccgccaggtcctgggcggtcgcttcatccggcgcggtacagagtacaacaacagcatcaggcatcgtcatcgtgaacctcgtatcagcgaaaagaggcactatagcatgcaagatagggaggattaacgaaacgggccaggatctggcccgaatttgaagagatttacagcatgatgccgccgaaaataaacccgaggatcacgcatagcgtaatggcgatgacgccggggatcaggaaggcatggttaaagacatatttgccgatacgggtggagccggtgtcatccatttcgaccgccgccagcagggtggggtaggtcggcagaacgaaaagggcggagacggcggcaaatgaggcgatggcggtaagcgggctcacgcccagcatcagcgcggcgggcatcagcgccttagtggtcgcggcctgggaatatagcagggtcgcggcgaagaacagcaccaccgccagcagccacgggtagttgtgcagcaggtcgcccgctacggtctggatatcgctgatgtgggctttcacgaaagtatcccccagccatgcgacgccgagaacgcagacgcaggcgctcatgccggatttaaaggtgctggcgttgagcacttcaccggtgtcgattttgcaggtgatgcttatcagcgtcgcgatagtcagcataaacaccacaatcgcttcgttacgcggcaggaccggatcctggatcagccctacggtatcgctgatggcggtggcgtagaacatcaccgcgacgataccgatcagaaacagtaataccgagcgtctggcgtgcggcttcagttcaaaaacctggctgccgcgcagtttgacttccccttttgccagccgctcctgataaatcgggtcgtctttcagctcacagccgaggaagttacagacgatggcggtaagcatgacggcaatcagggtaaccggaatacagatcgccagtagcgtcaggtagctgacgcccaggggctcgagaataccggcaaagaagaccaccgcggcggaaatcggcgaggcggtaatggcaatctgcgaagcgaccaccgcaatggagagcgggcgtgaggggcggatgccctgttcttttgccacttcggtgataaccggtaaggttgagaacgccgtatgtccggttccggcaagcacggtcataaaccaggtgaccagcggcgcgagaaaggtgatgtatttgggatgacgccggagcatacgttcggcaaggctgaccaggtaatccatccctccggcgacctgcatggcggcgatagcggcgataaccgccataatgatttcgatgacgtcgaaggggatcgcgccaggtttaatttgaaacacgagggtcaggacgaggacgcccaggccaccggcgaaaccgatgccgattcccccgagcctggcccccagataaatcgccagcaggacaataacgagttctgcaccaaacatatttgccttccttgttttattaacaagttgatattgggttgttgtaatttagtaaatcaataagaacaaaaagggcatgtcattgctgacatgcccgtggttagtttaatcggaaaacctactgttcgctttcatcggtataacgcttcgctttgtaggccggatgcatcaggttttgcgcagagaagatatcgtccagctccgccgcggtcagcaggccgcgttcaagcaccacatcccgcacgcttttgcccgtttcagcgcagattttgccgacgatatcgccattgtggtggccgatatacgggttgaggtaggtgacgatgccaatggagttgtagacgtagctttcacataccgctttgttggcggtgatgccgctgacgcatttttccagcaggttgtagcaggcgttggtcagaatatggatagattcaaacatcgcctggccaatcaccggttccatcacgttcagctgcagctggcccgcttcggaagccatggtgacggtggtgtcgttaccgattactttgaagcatacctggttgaccacttccgggaccaccgggttaaccttggcgggcatgatggaagagcccgcctgcagttcaggcaggttgatttcgttcaggccagcgcgcgggccggaagagagcaggcgcaggtcgttacagattttggacagttttaccgccagacgcttcagagagctgtggaccatcacgtaggcgccgcagtcggaggtcgcttcgatcagatcttccgcggggacaaccggcaggttgctgacttccgccagtttttgtaccgccagctgctgatagccatccggggtgttcagacgggtgccgatagcggtcgcgccaaggttcacttccagcagcagttccgcggtgcgcagaatgcatttggtctcttcgttaagcagaacattaaacgcgtggaactcctgaccgagggtcatcggtaccgcatcctgtagctgagtccggcccattttcagaatgtcctggaactccacggccttctgctggaaaccttcgcccagctgattaatcgcatcgatcagtttgaggatagaggcgtagaccgcgatgcggaaaccggttgggtaggcatcgttggtggactggcatttgttaacgtggtcgttcgggttgagatactgatattcgcctttctggtggcccatcagttcaaggccgatgttcgccagtacttcgttggtgttcatgttaacggaagtgcccgcaccgccctggaacacatcgaccgggaactggtccatgcatttaccgttattcaggacctcatcgcaggcggcgataatggcattggcgacgcttttggggatagtttgcagctctttgttagcctgcgcagcggccttcttcaccatcaccattccgcggacaaattcagggatatcgctgattttgttgttgctgatgtagaagttttcaatcgctctcagagtatggacgccgtagtaagcgtcagctggaacttccctggtacccaacaggtcttcttcgatacgaatgttgtttaacatgtgaaccttctctttcaagctgcctatgaattcaccaaatacgcagaatttatgggatctagcgcattttctggccgcagattatttccttaatcggcccggtgcccacgatcatatgctgatgatagcgaatatcagccgccctgatcacttattatgtagtgaatcttataagaattattaatctgtgaaatgagtcaccggttttctaattttgaaaaaaataagctttttttacgattgaaaagtgacgttttggcccaacatcttgctgatgcgaatagcacatctatgactacgggcgccgatgctggcgtctgttaatgaaggagacgccggtgcgttggattccgttaattgccgtttttttatacgtttacattgaaatctcgatctttatccaggtcgctcatgtgcttggcgttctgctgacgctgattctggtgatcttcagctcggtggtggggatatcgctggtgaaaaaccagggctttaaaaacctcatgctgatgcagcagaagatggcagcgggggagagcccggccgcagagatgatcaaaagcgtgtcgctgattatcgccggtttgctgttgcttctgccggggttctttaccgatttcctggggctgctgctgctgttacctccggtacagaagcatctgaccttaaaactgatgccgcatctgcgctttagccgaatgccgggcggcgggtttagcgccggaacgggcggcggcgatacctttgaaggcgaataccagcgtaaagacgacgaacgcgaccgtctcgatcataaagacgatcgccgcgactaacatgcattgcccgggccggttactccggcctggaatacccctccgccagcctgcgcttcggtaaaaacagccacagtaccgccagcatgataaacgcgtaaaggctcttccagcccaccatcgccagcagcagcaggcaaagcaggctgccaaacgccgctaacgcgcgataacgtccctcaagcaaacggcagcccgccagcatgcacagcagatagatcataataaaaatgccgttggcgtagacgatcagcgcatcaagattgatattgagcgcataaatgcataacgcgctaatgacgcagcagccgagcaccgcgttcagcgcgttgcgcggaatctgtcgcggcgacagccgggccagatagctctcgggcttgtactgcgcctgcgaccagaccaggcgagcaaaactctgaatatagatattgaggctggcgaagcaggcgagatagccgataacgcaggcaatccacagcgcctgcacgccaaacaggcgcaccacgatattgggcagcgacgcggcggcggccatctcctcgccaaaggcatgaaaatgcaggaccagcacggtacaggcccagtagacggaacccgccagtaataagccaatcatcagcgcgcgggggaaatcgcgttccggctgcttaaactcagaggccaggtgtgcaaaagcctccagcccgacaaagcaccagaacatcactgaaagcgcggagaaaagctgcgaactatcgatttcagcgggcgccgggaaggggatctgcgcgggattgatcgcgccgcgccaccagatggcgacgatcagggcgacaatcagcacggcaaccagcgtttgtagattggcgctggagctggctccgcgggaaccgacccaccagataatcgccagcgttcccagctcggccagcagcaactggctgtcgtgccagccaaaaagcgcctgaccaaagccggtggcgatgtgcagggccgcgggtaatcccaccgggatcaccgataaaaagagccagccggtgacgcgcgccagacgcgggccaaaggccatattcacaaaatgcgccacgccgccggcgctgggaaagtggcgacccagcgtcgcaaagacgatagcgatgggaaacaccagtaaaatcagcgccggccaggcccagaggctgttatcgccggcgaccagcgcggccagtgccggaacggcgaagaccccggttcccagtaatgacgtggagagtaatcccacgccttgagccagccctaactcctgttttaaaccactcatgattcaaccttgcgcccggcaaaaaaaggatggtatcacaatcgcttttgcttatgacgtcgggcgaggacggcaaatttatgtgcgtccgagcacgaggacaaatttttttttacttttccccttgaagcggtaaaaccccatccccatctctcagggcactagccggaaaaccgtgtgcggaccggcgtcatccataactgataatgactttctcaaaggagagctatcaaaatgagtattcgtccgttacatgatcgtgtgatcgtcaaacgtaaagaagttgaaacgaagtctgctggcggcatcgttctgaccggttctgcggcagcaaaatcaactcgtggcgaaatcatcgctgtcggtaagggccgcatcctggaaaacggaaccgtgcagcctctggacgttaaagttggtgacatcgtcattttcaacgatggctatggcgtgaagtccgagaagatcgacaatgaagaagtgttgattatgtccgaaagcgacattctggcaattgttgaagcgtaatccgcgaacgacactgaacatacgaatttaagggaaagataaaatggcagctaaagacgtaaaattcggtaacgacgctcgtgtgaaaatgctgcgcggcgtaaacgtactggcagacgcagttaaagtaaccctgggcccgaaaggccgtaatgtggttctggacaaatccttcggtgcgccgaccatcactaaagacggcgtttccgtagcgcgtgaaatcgagctggaagacaagtttgaaaacatgggcgcgcagatggtgaaagaagttgcctctaaagcgaacgacgctgcaggcgacggtaccaccaccgcaaccgtactggctcaggcgatcatcgctgaaggcctgaaagccgttgctgcgggtatgaacccgatggacctgaaacgtggtatcgacaaagctgtcgttgccgccgttgaagaactgaaagcgctgtccgtaccgtgctctgactctaaagccattgctcaggtaggtaccatctccgctaactccgacgaaaccgtaggtaaactgatcgcggaagcgatggacaaagtcggtaaagaaggcgtgatcaccgttgaggacggtaccggtctggaagacgaactggacgtggttgaaggtatgcagtttgaccgcggctacctgtccccgtacttcatcaacaagccggaaaccggtgctgttgagctggaaagcccgttcatcctgctggccgacaaaaaaatctccaacatccgcgaaatgctgccggttctggaagccgtagcgaaagctggcaaaccgctggttatcatcgctgaagacgttgaaggcgaagcgctggcgaccctggtggtgaacaccatgcgcggcatcgttaaagtggctgcggttaaagctccgggcttcggcgaccgtcgtaaagctatgctgcaggacatcgcaactctgaccggcggtaccgttatctctgaagagatcggtatggagctggaaaaagcgactctggaagacctgggtcaggcgaaacgcgttgttatcaacaaagacaccaccaccatcatcgatggcgtgggtgaagaagctgcgattcagggccgcgttactcagatccgtaagcagatcgaagaagcgacttctgactacgaccgtgaaaaactgcaggagcgcgttgcgaaactggcaggcggcgttgcggtaatcaaagttggcgcagcgaccgaagttgaaatgaaagagaagaaagcacgcgttgacgatgccctgcacgcgacccgtgctgcggttgaagaaggcgtggttgccggtggtggcgtagcgctggttcgcgttgccgctaaactggctggcctgaccgctcagaacgaagatcagaacgtcggtatcaaagttgcgctgcgcgcaatggaagctccgctgcgtcagatcgtatccaacgccggtgaagagccgtctgttgttgcgaacaacgtgaaaggcggggaaggtaactacggttataacgccgcaactgaagaatacggcaacatgatcgacttcggtatcctggacccaaccaaagtgacgcgttctgctctgcagtacgcagcatccgttgctggtctgatgatcaccaccgagtgcatggttactgacctgccgaaaagcgacgcgcctgacttaggtgctgctggcggtatgggtggcatgggcggtatgggcggcatgatgtaatcgtgcgctataccccttagaaataaagaaccctcgggcagaaatgctcgggggtttttctttttgtcgtctttttagtataaggttgtacatccgggccagtgcgtccagctcattgatcgtggggaataacatgcaggtaaaatatttagcagggattgtcggcgcagcattgttgttagcaggttgcagctccagcaacgaattgacctctggtggccagaacgtacgctttgttgaggataaaccgggttctgaatgccagctgttaggcaccgcgaccggtacgcagagcaactggctgtccgggcagaatggtgatgaaggcggctctatgcgcggtgcggcaaacgctctgcgtaaccatgcggcagaaatgggaggcaacgtgatttacggcgtcagcagcccgacgcagaatctgttgtccagctttgtcccgaccgatagccaaatgaacggccaggtttataagtgcccgaattgatttaacaggtgcctctcttgagccaatagaggcacctggcatattttttagcgcgcgttgattttcgcctgtgtcgccaggtagaacgcatgtaaaggccgcaggcactcctccagcgtcatcattctccccggctgagaaggaagaatttggctaaaaatctggctgggctggcgctgcgcatgcatttctttcagctttgggcttctctcaattaagcgcatcacaacgctattctcctgctctgacggatgggcggcgttggttttaatcaccgcgccggagatgatttttcggccttcctccgtgtcacagcagtacagtacgcccagataatgggaaaacagattgagtttccactcatcctgaagatactgctgataatcaatgttactggtattcgttaaatccagtgcatatagcatcaggctttccagtgatgacgttaaatttttaatcagttcgttatcaccggcgtttttaagagattgctgaataccaatcagcagcgcttcaacctgcatatcatcaatgcgcagcgtagcaatttgctcgttttgcagcaccagaatgagcgttgaccaggtcgctcctggttttaacgtaattgatatgactcgcctttccggattgggctgctggacttccggcatacctataaccggggtgttttctatgagctgctcattaaaagcaatcagttcattcttataactttcaccttcagcgtttaagcgctgtaatacgatagccatcctgtgttgtaaaactaacaggaggtcggtaagcgcctgggcctgaagatagtaagactggcaaagttggttactcagctttactttgagcattaatgctaaaaatttgtcttcatatttaattgatgcggtattaaaaccaataaacgtgccttgcattcggatctccttttcctgagggttacgctggtgccagcgtgcgtagctgtgataaatcaatgatgcgatcggctgaggcaatggtggatggccgatgggcgacgatgattcgggtaatgcttagcccagagatagactggttaatcaccgactcatttttaagatcgagatgactggtggcttcatccataaacagaatgctgggttttcggtagagggcgcgagcgattaagagccgctgtttttgtccgccagagatgcctaaaccgagctcgccgacaatggtttcgtatcccatcggcattttcatgatttcatcatggatattacatctgcgtgcgcattcaacgataaagtccatatcggcgttatcttcaaagccgctgatattatcgatcagggaacccgagaagagtctgtcttcctgcagaacgcaggccgttccatgacggaagttgttaaggccgattttctgaatatcgaggttatccgctatcacatcgccgctggtcggggacagcaggccacacatgactttcagtagcgtggttttaccgacgccggaagggccgaccagcgcgatggattcgcccggttcaacggtaatatttaaattagaaaaaataggctgtgaaaacggatcgtactggtagctgagattcttcacttccagtttaacgcccgtgttttctgcaaaaacgcgtcgtgaaggcagttctttttccggttcgctaaagacgatctctgaaagacgctcattatgtaacgacagcatacgcagctgcataatcagatcgatcaaacttgaggcgcgctgtgagaactgaccgcgataggcattaaaggccataaacatgccaagggtcatattgttatcaataaccataattgcccctagccagagaaccgcaacctggtcgatagaagtaataaaggtattaataccgccaaacatcatatcgaaccgagtctgtttgataccggcattacaggcgtcgatgttgatatttaaccagtgctgagaacggcgttctttcaagttcaatgccttaatcgttgaaataccatagagcgattccataaagtgcgagctggaacgggcgcccttgataacctgctcttcggcaacgcggcggtagaagctgtaggtcgcaaaacgcatgatgacgtagcataaagtaaagcccaccacgacccaaaccagccagccgccgtaaagcgttagcataatcagcaggccaacggtcataatcgaatcgataatgccggtaacaatgctattggtgaaggttgagcggatagtatccagcgaagagaaacgagactgaatatcgcccagatggcgcttctcaaaaaaggataacggcaggctcgtcagatgatcgaacagcgttgtcttccactgaatattggtcagcgtatttaacgttaatgagatccaggcccgcagcatactaataaatgtacggaagagcgtgaagaagaccagaccaatacagataaccgaaagcaggctctgatcgtgcgccatgatgacgtggtcggtgaccagctgcgtgccgatgggtaataacagaccgatagcttcaaccaccactgaaaaggcaaagatcttgagcaggacggatttcagcccaacaatattacgcatcaggtccagcaggcgtagacgagatttcgcctgttcctgctgaaaattttggtccggccatagctccagcgcaacgccggtaaagttattggacatttcctggatgccaataacccgtttacccagcgccgggtcgtgaacaataaagctgcttttacgcactttagtgagtaccacgtaatggttcataccccagtggatgacgcagggcagctttagctgcttgatttcatccaggtcgagggatagcgcgcggcttttcaacccggcatgttccgccgttttgctcaacgacatgagcgtaacgccctgcgaagggctgccgtagcgatgacggaaattgaacaggtcgatattgagcccgtagaagccgcaaaccatcgccagacaggcgataccgcattcggcagcctccgactgtaatatcaccggcgttttgtggcggaatgaaaaatttagcttgtcggtaatcgtcttaaaaagttctttattcatcgatcgggccactcacgctttgcgtcatcttatagaaaggggtaaacatccacatatacagcgggcgttcttcaagaaaaactaccgcctgagccttcaggccgttagagagcgtgagcgtttttccattgtagctaaaagtcttgtctttaatttttataatggctttatagagcgccagctcctgctggctagtgccgttattaacgttggtatattcagccatctcctggcgtgatgctggaaccgaggagatagaaatcacctttcctggaaattgtccaaatttatccgcaggaaaagcatcatagcgaatattaatcgtgtcgcctggcttcacataagggatagtattattgggtaaccataggatgagataatactcaatatcccctgtgggttttatctgtgcgaggctgctgccgttctcaaccatctgccccttagtcacggccagcgactcaatctttccattagttgtggctttaataatgagattaccgttcgcgttagattcaaccagctggtttttgtaatcattgatttgattgtgctggctggagatctgattatcaaagtctgctgctttggttattttatcgctattggtttgcgtgagctgagattccagctgcatcttttgggtaaccagagattgataggcgctttgctgttgaaaatataaagaatgctgatagttatactggtctttggttatcagaccatccttgaggtatttatcatagctggataagttggtaaacattttatttaagccaacctgagtcgtcgccagcatgcggttagtttctgccaatgaggcgctggtggttttaatctgtttctcaagcgcagttaatgtttcagatttattgcgcatcagtttgcttatgatatcttccgcattagcgattttttcattaattacttcaatttgggccgcgctcacattcccattgatggtattacgcgaaacgtcaagctcataaagcggttgacctttattaacgatatcacctacttttacgtgctgattaaccacaaaaccttgctgtggggcgaagacgttaacggagtgggggagcgtaatgacctcgccacgcacatcaatgcgttgagtaaaggtacaaaatatgagagataatacaagggcgataagaaaaagtgatgctaacaaggtgaccaaccacgccggaatacctgctaacaataatgctttccctttccagtgaatttttttgtactcaatcgcttccttgcgatagatattttttaacattgttatcagctttgagatagagaagtgagataaaagaaggctcgttagagccttcataaagttatggtctgaaaattttcttaccagtaggctagcgtaccatcaacaaatccatcaaacatctcgatgcatttatcgagagtgatatcccagccaaccatggcaccagcaatagcgccaccaacgccgccaacgcacagaccgtaaatcatccccaccgcctggccaattgacccgatacctaaaataccgccaccattgccgccaaagataccgcccatagcagaaccggcaagtgcgccagcagtggcgcctaaaatggatgccccaatagcttctgcgccattacaaataatgctacttaaggcattagcaacagacgagaaatcccaggagtagccgccagaaatctcttccatttcaaatacagttaattgtttcattatatattccttttatatatgggtgcttttttgaatacaacaagtcaaatcaaaagtaatttgacactttttaaatgaaaaccacgaatgcgcaaagtgatatttcgatgctgattctagtatgtgtttattatttttcaatgttcgctttgatgattgattaatgaatttttagtgattcatgtaacaacctttgtgaattaatatctatgatgtgattatgtgtgagtaaaaaacctgacaaagagaagtgttttgctcgccatacttgaagttgtttatgcatcggctgtgttcgctcatcccataaacttcatccagtaaacttctgggagcccactcgcaactaaaatcatttttgataattgagtttttatcgcaccaatagttctgtgctaaaccgaccgggatgaatttatatccttgttaaggagaagactattcctcctggagaatgacctctaaatctgtttttatctcaccggtgattcctgcagaaacatttttagcgattttaaaatagtcagcagtgagagttaagtcttgactcttagtactgacgaagggataagcgtccagatcgttaaattttatcgcagaaccattttttttaagaatgatacctatgttttgagcaccgtctggtaatgagtttaatagtagcccatttacgctcgttgatgctacagatatggggctaaaccagtaaatatattttttgttagtttccgaatctgggcacttaatatcgagggtaatgtttttagccttgcctgcggcgctgccgacggctactgagtttaaatctgaaatgtcaatggtggatagttttacgatactcccatttcgcggcgagatttcacaggtagtttccttaaaagtaatgttagtcaaatccacattgattctgaataattcagcggtattcgatgcacctgtgttggtctgatttggcgggccagccataaaataaaccgccgttttgtttcccttttgtttcgttatggggccggttttcactaaccagaccatgacctggccagacgctttagaaaaataatgattgctggctatttctggctgatctatttctgcaggggaaaaatagttaactgatggtaaggtaatatcagaaatctgaaacccaataccggggatgcccgtctcataaactatttttccaccaattttagtaatattagatgggcttacgacaggtacggctctgacgacataaacatcgctggaactacacgatgaaaatgttttgggatttacacttccacgtcttgccgacgctaatatgctaccgttaggtaatgtggaatccgcgatgacagaaccgttaaaactaacggtaatcgcaccgccacccgttttactatatgagcaggtagccaccgcctgtaagcttatgctgagtaaactaataataaaaaaaagacatttcatagtattactttccctgttggtggcaaaccgcagtcgtctgcgcgatgccttcgatttccgtagccagactataagccgctttacactgctgaccggcctttgacccccactgggcatagacttcaccgttatctttcagaccggacatatagaccataccgccatcagatacgatgctggcctgggcatttttatcggtagttgatgttaccgttgcgccatacggcacgttttctcctgacgctctcttaaggataagaaatgcgcgacggccaatattgcccgcgaagttagcccgtacaacggccgcacgggtgggcaccactttttgcgtcgtatttggcaactccatattattacccagagtcgtgctatctaaggttacgttggtccgatggtatggcgtaacgtacggaataatcgcgtagccgcgggagtccgtttcgatagtcgcgtcgttttccaggcgtacatttttcagcccgggcgctttaaccaatacggcggtctcagacatttcctgacctaaggtaataccgtcggcatgaactaatacgccaccgctcagaccatagttaattaactggctatttttggcataactgtagccggcgttaactgaacccgcggaaccacgatagttgccgtagatgccgccgctggcatcttccctattgctgtagccctgctggacgttccagtcgaggttatgattttctagcgcaaccccgctcagggaaacatactgatcggtggagcccggactgctgttggtggcgttgtaggtcgcataagcattgggcaaccactcgcttaaaggaatagagatattaaatgaaacgacatggtcatcctctacataacggccggagccattatttccccagctgtagcggctatagctatagcccgcataatagttgaagcgacggaacccgccattataaccaatatttagcgagttattgtggcgcttgctgtcccagtagtcctcaaatataccggatacagaaaggctacctaaccccgcccccaggctttggctcacggtaatattggttctgttacgcagagagcgcggagtatagccgccgtatctgttgctataggtgttcatcacatcgcttagcgtattgtacccggaggtcgaatagcgatagccagctacggtaatattggtgccggtctcaagaatatttttaccatagcggatacgccaggattggccggatgttttatcttcatctttcttgctggaccaggctgtcgtgacgtctgcggaaactgcgccaatatcgccaaggttttgcccggctccgaaagcgagcgcctgatagttggatgccgcctgcaaaccggtatagaaagtggtgttgcttaagacaccgtagctgatcgtagcctgcgtaaacggcttttcatctatatttccgtcatatgggcgatatttaccgctcgtaatttcatactccatctggccttctctgagcattaatggcagagaggcgtaaggcacgacgaagttctgtcgggaaccatctgactcctcgacggtgacgtaaagatcgccgttaccgccggtcgagtagagatcggtgatttcgaaagcgcctggggcgacaaaggcctggtagatttgatagccattctgtttaatgacgatgcgagcgttggtcctggcaataccccgaacaattggtgcgaaaccgcgcaggctttcaggaatcatatccgtatcggttgccagttgaatacccgtgaaggggacgctgtcaaaaatgctggagagagaggtgctttcacccatgactaaggtgctttttaacggaacaatgcttcgctgcacatagagatagacggaatcccaatcactcttcgtaccggctgatttattccaggtactaaggttgcgcaggcgccacggcccaacgttcaggccggattgtaaattaagattgtaatattcattgtcagcttcgtagtctttacctgaactaaactgatagttggtcagcaaggcgttaataccgtcatcaaactcatcgggagaaacaaaaccctgagcgattgtcgacagggctgcctgcggtatggagatcagcaactgttgagtattaaagttaaaatcggtagtcaaatccgggatgacgctcgtatcagcacagccgtttgcatcctctcttaatgttggaaatgcttctgaacgtaaaccataggttgttaatttagcaatgcttaaacaaggggccaatttttgcgcacctgtcaccggatcttttttgtcaacaaagcggatatcagctgtttcttgcagactattatttaaaataacgtcaatccgatacacccctggcgcctgcgcatccctggttgagtagagggataaatccggtattgaggatggatcgccctgatttactgacttaataaaagcgggatcaaaaaaatcacgtgcgagggtattagtgcttaaaccgagagcgagcgccggaacgagaacgaaaaatgtgtggtaggttgcagatagtgcccctcccattttttttattgaaatagacatacttttcaccctggccaatgaagaagaatttatatcgatgaggtattggctggccctgaacccccgttatccgtagcaaccttccactcgatctctgaaccatttatatctgcaggcaaagtaaactctttgctggcaaaagcatcaatattattaactgaactggtaatatccctgccgtttattattattgatttaaaataaatgaagaacggcgtcggattttttagcgttattttattaccggatttacgccactgcagttttttagcttcagtagtaatattcagatcctgaatagctcgagggcgatagatgagacgcattctgtggcgaacggcgagctgcagcttgtttttgtcggcttcactttcgctggtcggtgggatagacataacgttaaagaagtaaacggtttcacgatcctgcggcgctttggatatatacgcattagggaaaatacgcaccgtattcgtttgctttccctccagacggaaaagcggaggcgtcaccataaaaaagctatcttttatcccttcagatgcttcaacccaggatttaatgagatagggcgtatcatctttgttttcaatgtttgcgctgatttctcgcgcgccttctttataaagatggcgggttgaatcaaccacgactccggcctgagccacaaagcagatggtaaaaaaagaaagtgtagtcagcctcaataatgacttcagcataattcattccctgaataaaataatggggtttacctgaggtaaaccccggtatgcttattagtagctaatagtaaaggttgctacacccttaactgcaccatcggtaacgccgtttgcggttttaatatatgccgctttataacgcagataagaaggagtccctgcagtataagcaataaccttaggcgtagtaccggtgaagcttacgcgggttccatcagtgttaaccacggtaacagcagcgttagtcgccggactggcagcggtgttggtcagtacgtcatccaggccgctgatgtagtcgcctgttacggttacgttgatattaccggaatatttagtcgcgcctttctggcagtcttcgattttatactcaatgtcttttgctgtagacatatacggcgtgttgactgccattgcctccagcacggatgctttgacatcgtccagagttaaagaaccgcctgaaatcatcgcggacggcgttacgttacaggattcgccggtgtcagtaacgttacccagaatagtcagagaagagctgttccctgccgcgaaagcctgaacgctcaaagctgcagaagcagcgaccattacagctacaattgtttttttcatttatttaatccatttatatatactaaagtcctgaatagtgccagagcgtggatattaattagtatgatatataataactaacattccgctatgtattcctgaacactatcgttattttcctcctgccgacgctattatacaaatctgatatacatagcgcatattgtgccggagcggtaccaaatctaagtgcaggatagataaaatgcatgtgaattctgtttgaatttaaaggttagttgttgaagcttgcaaattcacaagcagatttcgtagataataatgagcgtagctggaacgtatagttgtaaatcagccttccctttggttcaaatatcatgataatattatccccgctctgggaggagcggggatttatccttggaattatctaatctggcaggctaaaagggatgttctgtgtttgctaaaggtgaaattgaatttaattcatctttgtttcatatggaatggtgagagaggattgggattatgatattcaatgaatatatcattaataatgaagttatttttaatgtaaatatgaatgagctgcagcctgtaggagacaatggggatagtgtgaccctcaacgcaccaacggcacgctgcctgcagcttttactcgaaagcaacgggaagattatatccagagaagaatttctggatatagtatggaaaaatagaggaattgtcgtttctcagaatacgttttatcaaaacatttccttgctaagaaagtcgttagtgaaagcaggattgtcgcaagatattattgttacagtaaggcagcggggatttgttctcgccgcaggatcaaatatcgcgtcattcttccgtacggacgaaaaagagccagaaaaccctgaaaatgtgcagatcaccgcgagcacatcttcgcctccggttgagaacaatgtgattcaccatttagccattcaggacgatgcgcaaaaaagtttcagtgacaataacgcaaccgagttcaaattacctaagtggattttacctctgctattggtgatgaccgcagcaaacattctttctcttttcttgtaactttaatgagtgggtttacagcttgcttttatatttgcttttactttcttccggaaaggataacgactggttttacgaaaatgattaagccgcagtatttatatcccagtgagtaatagtaaataagcagtctgcctggcttcgcccggcagacggattgactattgctgctttaaccccaggtcgaggggcgtcttgctgggttccccgccgatttcccgcgctagtttgggtactaaatagccggacaccagcgtcaacaattcgcgcacgatcgctctggcttcttcgtcactgaccataaaatgcgccgcaccctgcactttgtctaacacgtgcagataataaggcatgacgccggcgtcgaatagcgcgttgctcaggtcggcaagtgtgttggcgttatcatttacgccgcgcagcagcacgctttgattcaataaggtcacgccagccatacgcagttttttcatggaggcacgaaacgccgcatcaatctcgttggcgtggttaacgtggttcaccagcagtacccgtaacgatgatgcagcaatacgggcaaccagcgtatcagtaatacgcgcaggaatcacaatgggcagccggctgtgaatacgcaggcgcttgatgtgcggaatagattccagctgcgtcaatagccagtcgagttcatgatccttggccataagcggatcgccaccggaaaaaatgatctcatccagctggggatgtgccgaaatatactccagggcctgctgccagttacgcttattgccctggttttcagcataggggaagtgacgacggaagcaataacgacaatttaccgcgcagccgcctttcaccagcagtagcgcacggttgctgtatttatgcagcagaccgggcacaacgctatgctgctcttccagcggatcggtagagaatcccggggcattaataaactcttcctgggaggtaagtacctgacgaagaagaggatcgttgggattacctggctccatacgggcaataaacgcccgcggaacacgcagtgcgaacaggcgtttagcatcacgccctgccaatagattcgcatcagcgtctacatttaaaagatgcagcagttcatcaggactggtcacaacatcggcaagttgcgttaaccaatcttctctggatggggtatttagggttacaatatgcgccattttgtggcttagctaccaattaacaaaatttcagagggccttatggcgacttactatagcaacgattttcgtgccggtcttaaaatcatgatggacggcgaaccttatgccgttgaagccagtgaattcgttaaacccggcaaaggccaggctttcgcgcgcgttaagctgcgccgcctgttgaccggtactcgcgttgagaaaaccttcaagtctaccgattctgctgaaggtgcggacgttgtcgatatgaacctgacttacctgtataacgacggtgagttctggcactttatgaacaactctactttcgaacagctggccgctgacgctaaagccgttggcgataacgctaaatggctgctggatcaggctgaatgcatcgtgaccctgtggaacggtcagccaatttccgtcaccccgccaaactttgttgagctggaaatcgttgaaaccgatccaggcctgaaaggcgataccgcgggtaccggcggcaagcctgcaacgctgtccactggcgcagtggttaaagttcctctgttcgtacagattggcgaagtcatcaaagtcgatactcgctctggcgaatacgtctcccgcgtgaagtaattcaggcggcgaaagagttggcgcagcgcgatgctgcgccgctacaggttgaaaccgcaggcaaggaaaatgaatcccacactgaaacttttgctactgttattgctgaacggttcgctgctgactggatgcaatacggctcgcggcatgggcgaggatatccagagcctgggtcatgctatttctcacgcggtcagctaatcttatttcatcaggcaattcttattcatatactcacgctctatctgattccctttcttcacttctttttctcttaaaaatcgtctcgcttccctcatcctggaccagtttgtctatgcttatagagcacgataactaaaactggttaataaggatgacattatggtaaaaaaagcgattgcagcgttctttacggttttggcactttcctctgtactgaccgcatgtaacaccacgcgcggtgtaggtcaggatatttcagaaggcggcagcgcgatttcgggcgccgcgaccaaagctcagcaatagaccatggcggtacggccgttggtcgtaccgttcttcctcaccgttgccacgtcgtgtataattcctgtggaatatcatctaccttacgggacggcctgtaagcgtttcacatctggggacggccccatcaaaggagccatatgtcctggtttattctgtttatcgcgggtctgctggaagtcgtctgggctgtcggcctgaaatatacccatgggtttagccgcctggtgccaagcgtgataacgattgccgccatggtcatcagcatggcgctgttgtcgtgggcgatgaaaacgctacccgtggggacggcttacgccgtctggaccggaattggcgcggtcggcgcagccgtgacggggattatcctgctaggcgaatccgccagcccgatgcgcattgccagcctggcgtgtattgtgattggtatcattggcctgaaaatgagcgcgcattaatactgctgattgacccacagcagtttactaacgtcgaatccctgccgggtagcgatatccagcatctgctgcttcacttctggcgggattttcggcgcgcgcgccagtagccagagataatcccgatcaggtccgcaaaccagcgcgtagcgataatccttgtccagcgcaatcacgttatagccgccatagaaggggccgaaaaatgacactttcagcgcggctcgcgtgggctccccggtaaagtaagctacgccgtcggttttctgccacatcccccggtcggggttgtatcccttattgaccacgtccagcccaccatcgtcgcgcaggctataggttgcggtaactttttctaaaccgctctcaaaagggtgatcgaagcgggcaatctcataccaggtgccaagatagcgttgagggttgaacggactgaccacggttacgccaggaggtggcgtcggcgcgctgcaggctacaagcagaaatgaagcggcaacaaccgcaataacgggtagcagacgcataatgttttccttgccagttttaagctaagtgtagattcaggcaggaaaaatgcggcagaattttcttgagaagcgagcccggtaacataatgctaccgggcttatcgccgaggaggtaaaagcggcctccggcgagcgctttagatgaacaatatgccgaccagagtgacgacggtcagaatcgccgcaaggccgtagaagacccacttaccgttgggtacgtgaattttcaaatcatgcatcgcatggtgaatacggtgaagtccacaccatagcggcagcacaatcatcaggaaaatgaatgcgcggccaataaagctatgggcgaaagccagcacgcgttcgtagctgaaggcgtccgcgggcgccagtccgagcggcagcataatacccaccagcagcacgatgacgggggcgacaatcgctccccacatgccgccagcgccaaacagcccccagaataccggttcatcagaacgttttggtttgggattaatcattccagcctccttaccagaacagcgcgacaaacaggatcaccacggtgacgaccgcagtgacgacccaaagccccttaataaccggctctggccccattttctcgcctttaaggataatattggcagctttcggtgccagctcaaaccaggttttggtatgcagcagcgcggctgcaagcgtgatcaggttcaggatcacgacaatcggattttgcagaaaaccgatatacccggcccagctctccgcgccgtgcttcagtgcgaacaatccgtaaatcagcacgatgctgaaccagaccgtgggtaccgctgttccctcacgcagcatatagaagcgataaaacggcagctttttccaccaggtggacggcatcggccgcacgtagggtttgcgtttagtcgtcatactgcactccttagcgtggtttcagggtggcgataagaaagtctttcgagctttctaccttgccctgctggatcgcggccgccgggtcgacgtgtttcgggcagacttcggagcagtagcccacgaaagtacatgtccagacgccattctggccgttaagctgcgccatacgttcctttttaccgtggtcgcggctgtcttcgttatagcgatgggcgagggtgatcgccgccgggccgataaactccggattaagaccaaactgcgggcaggccgcgtagcacaggccgcagttgatgcagccggagaactgatggtatttcgccatctgcgccggcgtttgcttgtttggtccttgatcgggcgtgcgcgggttgccaataatgtacggcttaatcgcttccaggctttcaataaagtgggtcatatcgaccaccagatcgcgctcaatcgggaagttagccagcgcctcgactttaatgcctttggtgtattcgcgcaggaaggttttacaggccagctttggcaccttgttcaccatcatgccgcaggaaccgcaaatcgccatacggcaggaccagcggtagctgaggtccggcgcgagattgtctttgatatagcccagcgcatcaagcagcgaggtttgctcatcatagggaacttcatagaaagcgctgtgcggtgcgatgtccacttccgggttgtagcgcaccacttcgactttcatgtttttcatctcagccattcgtcgtctccttcttctcggctgcttccgcttccgcaccgtacacgcgttttgccggcggcagagtggtgattttcacatcactgtactccagcctggtgtgaccatcggcatcgcggaaggcgagggtatgcttgaggaagttgacgtcgtcgcgctcggtgcagccttcatccaggcgctgatgcgcgccgcgggactctttacgcgcgagggcggaatgcgccatacattcggcgacgttcaggccatggcccagctcgatggtgtacagcaggtcggtattgaacacgctggacgtgtcggtgatccgcacgcgcttgaagcgctcctgcagctcggcgagcttatcgaccgttttctgcatgagctccggcgtacggtagatgccgcagccttcttccatcgacagacccatgtcgtcgcgaatcttcgcccagttctcgttaccttcctgattaaccaggtctttcaggcgcttctcgatatcgacgacctgcgcgtccagcgcggcgctattggcttcgcccgcttcggttgcgcgctgcatggcctgctcaccggccagacgaccaaagaccaccagctccgccagggagttggagccaaggcggttggcgccgtgcagacccacagaagaacattcgccaacggcaaacagccctttgatacgggtttcacactgctggtcggtttcaatcccgcccatggtgtagtgtgcggttggacgcaccggaatcggctcttttaccggatcgacgccaacgtaggctttcgagagttcacagataaacggcagacgttcaagcagctttttctcacccaaatggcgcagatcgagatagaccacatcgcctcgcggcgtagggatcgtgttgcccttgcgccattcgtgccagaaagcctgggagactttatcgcgcggacccagctccatatatttatttttcggttcgcccagcggtgtttccggacccatgccgtaatcctgcaggtagcggtagccgttcttgttgaccagaataccgccttcgccgcggcagccttccgtcatcagaataccggagcccggcaggccggtggggtggtactgcacgaactccatatcgcgcagcggtacgccgtggctgagcgccatacccatcccgtcgccggtgacgataccgccgttggtattgtagcgatacacgcgtccagcgccgccggtagccagaactaccgcgttggcgcggatctgcaccagcgtaccttccatcatattcatcgcgaccagaccgcgagcctgcccatcatcgaccagaatatccagaacaaaatgttcgtcgaagcgttggatttgcgggaattgaagcgaggtctggaacagggtgtgcagcatatgaaagccggttttatcggcagcgaaccaggttcgttcgatcttcatgccgccgaatcgccggacgttgacgctgccgtccgggcggcggctccacgggcatccccactgttcgagctgggtcatttccgtcgggcagtgatgaacgaagtagtcaacgacgtcctgctcacatagccagtcgccgccggcaacggtgtcgtgaaaatggtactcgaagctatcatgatcctgcgcgacggcagcggaacccccttcagcagcaacggtatggctgcgcataggatagacttttgaaattagagcgatttttgcatttggattagcttgcgcggcggctattgcggcgcgaagacctgctccgcctgcgcctattacggcaagatcggcttgaaaagtttgcacgacattcctccagtttttgtttatttcgccgccgggctggcgaaaacgtatcactgctcctttataggtaaggagtatagccgtagggttatgagggaaaattgacgtgttcgatttttttatcgttctgtgcggtcctttatctcattgctttatgtttttgggttatcaataaattaagtgtatgtaacgcgtttacgtattcgcacaaaatttgtttcatccgccagttacgagtagacttcgtgcccttgtttcaaatcggagaacgtaccatgagcgaaacggcaacctggcagccgagcgcatccattccaaatctattaaaacgtgcagcggtgatggcggaaattcgccgtttctttaccgaccgcggcgtgctggaggtggagacgccctgcatgagtcaggcgacggtgacggatattcatatggtcccgtttgagacgcgtttcgtcggtcctggtcattctcagggactgaatctgtacctgatgaccagcccggagtatcatatgaagcgcctgctggcggccggctgcggcccggtctttcagctgtgtcgtagcttccgcaatgaagagatggggcgccaccataacccggaattcaccatgctggagtggtatcgtccgtgctatgacatgtaccggctgatcaatgaagtggacgatctgctccagcaggtcctcgactgccagccagccgaaagcctctcctatcagcaagccttccagcgtcatctggaaatcgatccgctgtcggcggataaaacgcagctgcgcgaagcggcggcgaagctggatctgagcaatattgccgatacggaagaggaccgggatacgctgcttcagctactttttaccatgggcgtcgagccgcacatcggtaaagatcgtccgacgtttatttatcacttcccggcaagtcaggcgtcgctggcgcaaatcagcaccgaagatcaccgcgtggcggaacgttttgaggtctattacaaaggcattgagctggcgaacggttttcatgagctgaccgacgcgcgcgaacagcggcagcgttttgagcaggataaccgcaagcgtgcggctcgcggccttccgcagcagccaatcgatcataatctgctggccgctctcgaagccgggctgccggattgttccggcgtggcgctgggcgttgaccgcgtcgtgatgctggccctgggggcagaaagcatcggtgaggttctctctttcaccgtcgaccgcgcctgatcctctcttagcttccctttcgatgatggaagggaagctcgccttttagccctaatacccacaataaccatttggttttttgctactatccgcgctcatttttttgggctatccggcatcctctgccgcgataccgcgtttggatagatttatgcaccagcaaataaagaagatgagcctgattgggctgatattaatgatcttcacctcggtatttggttttgcaaacagcccctctgcgttctacctgatgggctacagcgcgatgccgttttatctcttctccgctctgtttttctttatcccgtttgcgctaatgatggcggagatgggggcggcctatcgtaaggaggagggcgggatctattcatggatgaatcatagcgtcggcccgcgctttgcgtttatgggggcctttatgtggttttcatcctatgtggtctggatggtcagcacggcggctaaaatttgggtgccgttttccacattcttattcggcgcggataaaacgcaatcctgggcgctggccggactgacttccacgcaaacggtcggtattcttgccgcgtgctggatgctgctggtgacctttgtcgcggtaaaaggcatgcacaaaatcgccaaaattaccgccgtcggggggatcgcggtcatgggccttaatctggtcctgctgctggtgagcctggtgattttactgctcaacggcggccattttgcccaaccattggatttcacggcctcgcctaatccaggctatcagtccggtctggcgatgctatcgttcgtggtttttgccatctttgcctacggcggaatcgaagcggttggcggtctggtggataaaaccgagcagccggaaaagaattttgccaaaggcattgttatcgcggcggtcgtcatttctgttggctattcgctggcgattgttctgtggggcgtgagcgccaactggcagcaggtattgagcaacccttccacgaacctcggtaatatcacctacgtgctgatgacccgccttggcgccaccctggctaatgcgatgcatctgccgcccgccgtcgccgccctgagcggattatggtttgccagaatcaccggactcgccatgttcctcgcttataccggcgctttctttaccctgagctactcgccgttaaaggcgattattcagggcacgccaaaagcgctctggccttcagcaatgacgcgaattaacgcgaacggtatgccggcgaacgccatgtggtggcagtgcctgctggtgagcgtgtttattctgctggtttcctttgggggcgataccgcgtcggcgttttataacaaactgacgctgatggcgaatgtctctatgacgctgccgtatctgtttttaacgctggcatttcctttttttaaggcgaagcaggatctcgatcgcccctttgtgatttttaaacaccgcggctcgacgctgctggcgaccgccgttgtggtactggtggtggcatttgccaatatctttaccgtgattgagccggtgatggaagcaggtgactggagcagcgcgctgtggatggtcggcggaccggctttcttttcgctgctggcgctggggatctatgagaattaccgccggcgtacggcggtgcagctgatggttcaggagagctaaaacgctggccttgcctgcgttcaggcaaggccgttcttacaggctgccgggcgcgcggctggttttccctgccgaggtcagcgccctgctgctttttctgccatcgatgctctccaggcgcatctggaacggcgggaacggcatatcgataccgtgctcgcggaatccggccagaatcagctggtgcatctcgtggcgcagcggcatccggtgccccatttcggcggcgtagatacgcagctcgaaaatctggatcccctgctgcagatcaacaagaaacgcttccggcgccggggtatcgataaccaacgaacagcggtgcgcggcatttaacaggatctgcgccacctcttcggtatcggcatctaccggagcaggcaccgttagcaccacgcgggtcaccgaatccgacagcgaccagttgatgaactgttcggtgatgaacgccttgttcggtacgataatctctttacggtcccagtcgctgatggtggtggcgcgggtattaatacgcgtcacgctgccggtgagatcgcgaatggtgaccgtatcgccaatgcggatcggtttctcaaacaagataatcaggcccgagataaagttggcgaagatctcctgcaggccaaaaccgagacccacaccgagcgcggcaataagccactgcagcttggaccactcaatgccaatcatcgagaagccgaccagaccgccgatcagcatcagcagatacttagtgatggtggtgatggcgtagccggtgcccggcgtcagttccagatgctggaggatagccagctccagcagcgcgggcaggttgcgcaccagctgggtagtaataatcagcaccaggatggctatcagcaccgcgccgagggtaatcggctccaggctctcaacgccctgtaccgtggaggtgacgtcccacagcgagatattctccaggaagccaaacgcggagtggatttctgaccacagcacgataaccgacaccagcgcgatcagcatcagcagggagcgcaccagacgcaacgactgggtactgatggcatcaagatcgacctcgctgacctctgcttccatcgaaccttccgggctgctggtatgctggacttcctcttcgccgcgggcgcgctgggcgaggatctccgcccgacggtgcttcgcgcgatcgaacgccaggcggcgccgctggatcagcatccagcggcgtatgatgtgataaaccaccagcagcaggaaccagatggcgaccgaggtttcaagcctggcgagcagcgcctgcgacgtggcgagatagccgatcgccgccgccagcatcgctatcagcggcgcgccgagcagcatattccacagcagccggttcagcatattgtcgccgctgccttctttgtcgagatacagcggaatgccggcgcgtttcaggctcagggttaccatcgccagcgcgccgcaaatcagcataaagcagaggcggcccagcgaggcggagaactcgcgatcgttgaggttatcgaaagtaatcagcgccataatcagcggcacgatcagcccgatgctcatcaggtagtagcgcatcgctttgctgacgcggctgcgcggccagccaaagtgggcgataaacaggccgttagggcgggcgaacgtggcgcaaatcatcacgacccacagcagcggtaccgtggcggtgacgctatcgccaatcgctacggccagcgggaaaggccaggcggcctgcagcccgtagcccagcgtcatccacagcaccggcagcggcgaggccaccagtatggaccagaacaccgtgcgcagggtgagccagaagtgatcctgcgtaaccttaccgacgcgcgcgctggagcgctcaaggaagctggtgaaatggcggcgtgagctaatactgaaccccaccagaatgagcgcgatgaagagcggcagcagggtctctttgctggtcagcatcatcatgctggccttaccgagctggctcatggtatcgagcgagatcaggcggcggagatcctgaacgatctccagcggccatgagaagccgattgggctgacgtccgaggtccagaacagatagcgatgggtcgcttcgttgatctctttaagcgcatcctctagctgaccgttagcgaccttcagcttggtcagttcgagcataagcgtatcgccgccgcgcagcagggagttgagcagctcggtctgcgtgcgcatctgggcctgcagaatacggttctgttccgcggtgagcggttcaccgctggcctgacgaatttgtcttagctgcggctgtttgccgagctgatcctcatagcgcaggcgctgcacgcgcagctgcgccatttcggtatccagctgctgcggccgcgggatttccggcagccgcgccacctgcgcgcgcagggcttcaccaagcagattggaagagcccagccactgggactgctcgcgcagggtgtttaacgcctgacgcacctggagggtctgatttgtcgcctggcgctgctgcgaggcgatcaaatccatccgctgcgcctgctggttgagcgcctgcgacagctcgcggttaactttaaactgcgccacgatatccggcggcaggttttcgctgttttccgccagcagttcggtgctttccagcgctttttccgcctcacgctgccgttggttattgagctgatttcgcagcgcctgtagccaggcgtcgagctgctcgctctctttctgcgccagctcagatcgcaaccgtgagagctcctggcggttattggcggaaagctgcgccagatccagctcatcgaccagcgctttcagccgcgcggactccgcctgcagaccaagattttgcgcctgtgccagcggggtattgctgctttgcgcgccgacccggcgttcaacctcattcagctggcggcgggcatcgctctgctgctgcggcagctggttgagggagtcggcgatgtcgcgggcgcgatcctgctcctgctgagctttacgactggcttccagcagctggctgctgacctggagaatctcctggttcagggcatcggaggagagggtagtggagacctggcgcggctcatcgctgagattgttgagctgcgcgcgcaggttttgcgacagtttggggaagttatcgataacgtcctggtactgacgggcgcgctcaagggaggcattacgctcctcaagggcgttcagggcagattgcaggacttcaacggtttcaggctgggcgggctttgccgccttcgcctgttccagttcctgggctatctgtttagcatccggggctgtcgctgcgtacgccccaaaactgaggcaccaggccaacaggaaagtgtatatcaggcgcacggcgtaaccttttttcaggaattaaccttcgtcttgtttatcgtcaaccagcgggctggctgcgtgttcagcgcggacttcttcttccgccagcggcgcgggctctaccggcgccgcggcttcaggcgcgatcgccagcggctggcctattttggtcaccgacaggctttgtaactgctcaaccagcttcacctggcccggagcaaacaggttaatcaccgtggagcccagcttaaagcggcccatctcctggcctttcagcagggcgacggagccttcgctatcgccagcaggccaggtccagcgcttaatgatgccttcgcgcggcggcgtgacggtaccggaccacacggtttcgatgctgccgacgatggtggcgccgacgaggatttgcaccatagggccaaactcagtgtcgaacaggcagatgacgcgctcgttgcgggcaaaaagattcggcacgttttgcgcggtcagatggtttacggaaaacagatcccccggcacgtagatcatttcgcgcagaataccgttgcacggcatatgcacgcggtggtaatcgcgcggcgaaagataggtggtgacgaagctaccgttacggaacaggtcagccatctggtagttaccggccagcagcgcttccaggctgtagttatggcctttagcctgcaaaattttgtcgtcttcaatggcgcccagttggctgatgacgccgtcggcgggcatcaccagcacgctcgggtcggtgtttagcggacggacgtcgtcgcgcagcgggcgaacgaagaagtcgttaaaggtacggtagctggcggtgtcaggcttttgcgcctctttcatatcgaccttgtaatatttcacgaacagatcgatgaccagttttgtcagccagcctgctcgtttgcgtgcaccccagcctgcgaggcgggtgagccacagtttaggcagaatgtattgcagtgaaagtttaagatcgtttaacaaggtagcctccaggccattatttgtcgttcctggccccgcggagcagcggagcctgaaaaaagggggacgattctaacgatgctcagcttaaatgtcagtcatcggttgatgaaaagcttttacgcgtttttacctgtacctgcgccatgctttccagaatgcgatggtagttttcaaaccggctttcggcgatttcgcctttctccaccgcttcgcgaatggcgcagcccgggtcattgtcgtgtttgcagtcgcggtatttgcagcggcctaaataatcatggaattcgacaaagccgtgggtgatttgttccgcgtcgagatgccacaggccgaactcgcgtacgcccggcgagtcaatcacatcgccgccgtgcgggaagtggtacaggcgcgcggccgtggtggtgtgctgccccagtccggagacatccgaaacgtcattggtgaggatttggtcatcatgcaggcccagcagcgcgttcagcaggctggatttgcctacccctgactgcccggcaaagatactgatacgatcggtgagcgcctcttcaagcggcttcaggccatcctgcgtgcggctggagaccatcagtacgcggtaaccaatatggcgataaatgtccatttgctcgttgacgaagtccatgctcgcctgatccagcaggtcgatcttattgagcacgatcagcggctcaacgttcagcgtttcgcaggccacgaggtagcggtcgataatattcggagaaagctcaggcaagatcgcggaaacaatgacaatctgattgatattggcggcgatgggtttgacgccgtcgtagaaatccggacgcgtcagtacggaggtccgttcatggacggcctcgacgatgcccttgacgttgacgccgtcagcttcgcttttgccaggccgccagaccacgcgatcgccggtgaccagcgaacggatagtgcggcgtatgttgcaacggtggacgctaccgtcggcggattcgacatcggcatgcatgccaaagcggctaatgacggtcccttcggatttctcaccgaacaggttgtcatcaaaatcggccttctccgaagtcgttttcaggcggcgctggtggttggccttcacgcggcgctgttggcctttggagagtttatttttactcaatcgaactggctcctggtcgccctgtacgggcaaaacctctatgatacacgctattttagatgaatatagtgacgtaagaagggtggaaaataacatgagtgcagatgaaaacaacctgatttggatcgatcttgaaatgacggggctggatccggagcgcgatcgcatcatcgaaatcgccaccctggtgaccgacgcgaatctgaacattctggcggaagggccgaccattgcggtgcaccagtcagacgcgcagctggcgttgatggacgagtggaacgtgcgtacccataccggcagcgggctggtggagcgggtgaaggcgagtacccagggcgatcgtgaagccgaactggcgactatcgaattcctcaaaaagtgggtaccggcaggtaagtcgccgatctgcggcaatagcatcggccaggatcgccgcttcttgtttaaatatatgcctgagctggaagcgtatttccactaccgctatctggacgtcagcacgctcaaagagctggctcgtcgctggaagccggaaattctcgacggttttaagaaacaaggaacccatcaggcgatggacgatattcgcgaatcggtcgcggaactggcctactatcgcgaacactttattaagctttaacgcccgtgccggggccaacacgccccggtcatacccccgactatttaaaccacttctgttccatggcctggaactccggcgaggcttttacgacatccagagcggcattgatgttattcagcagctcaggatcgtctttacgtaccgcaatggcgtactgcttaccgtagtagccgggatccgtggcgcgttcgtccatcatggcgtagtcggggttatcctggagccatttcgttaacgtctcctgatcgcccatcacgccgctaatcacgccttctttcagcgcgctcagggcgctttcgtcgctgtcgtaaggcaccgcatgcacggctttttgtttctcccgcagatagtgctgatgaagggtgcctttcacgacgccgatttttttatccttcagatcggcaaaggtgtgggcggcgtctttcgcggtgacaactacgccggacagcgcctgacgatagggatggctgaacgcaacctgcttttctcgcatcggaatcacttcgataccggcaatcaaggcgtcgaatttcttaaagcgcagcgccgggatgagggtatcgaacccctggggtgtgaatttgcattcgacctgcatctgcctgcacagcgcgttggccaggtcgatatcaaaacccgtgggctgatttttaccattgacggtttcatacggcggattggccgtcgttgtcccaaaatgtagcgttgttgccgatgctgttcctgtggcaagcgtggccagcagcaggacggtaagcgcttttttcattttatttccctggttgtcatcgttgttgaccgtcagcgggcgatatccgcctataaacttgagcgattttgcgcctttagcgggccgggaaaaagtgattttgccgcatttgctggttatttagacaattcaggccggtgtgtggtgataaagtggtcacttaaaccaaaaacgaaaaaaattgcgctcaggggggttgcaggtaaatcgaattctcgtataatgcgcctcccgtgacgaagcagaaatgcaaatcacgacgccatagaaatatggccagaagtatgcgggaatagctcagttggtagagcacgaccttgccaaggtcggggtcgcgagttcgagtctcgtttcccgctccaaaatttgaaagttaccacacccaagcgggaatagctcagttggtagagcacgaccttgccaaggtcggggtcgcgagttcgagtctcgtttcccgctccaaaatttgaaagttaccatacccaagcgggaatagctcagttggtagagcacgaccttgccaaggtcggggtcgcgagttcgagtctcgtttcccgctccaaatttcttctcatacccagtttatccacagcgcaagcacgcgccggtgatgattttcgcccggtcctgaaaatactgtgaacagagttatccacaggttaacctttcgtcctctctcagaaaattacttcactatgtaaatagtattcttatatctaattgaaaaataagagttaaatttcatttcaaagtgttaatccgatcacttgacgaacgtctgccccttgaaacgcaatgtgtttttatttttattcacaccctgtgaatgaatcaggcgtcgcgcggtagccctttttcaaccaccctgaccagacgcagctttttgggtaactgcacctcaaccacattggcatttctcttttcaatttgctgcgccatcgcccactcgatatgttcgtcgagaagcgggtgctcacccctgcggctttccagcgccttcaggttcgcttcatcccagggcgcgttgcccaacgcgacggcgatattacgcagccagcgcagatgaccaatacggcgaatggccgaaccttccgtcacttttaaaaaccagggttcgctccaggcgaacagctcaataagcgccggggcgtgtagcgccttgcgcggactgaaatcctcttcatcggtgagctgcgcgaagcggttccacgggcaaatcaactggcagtcatcgcagccgtatatgcggttgccgatcagcggacgaaactcttccggaatagcgccttccagttcgatagtcagataggaaatacagcgccgggcatcgacggtatagggctcgacgatggcgccggttgggcagatggtcatacaggcaacgcagcggccgcactcttccttgacgggctggtcaatgggaagagggagatcgataagcagttcaccgaggaaaaagaacgagccggcatcgcgactaaggatgagcgagtgcttacctgtccatcccagccccgctttttcggctaaagggcgttcaagaatcggcgcggaatcgacaaaaggtctaaaattgagcgaagcacactgtccctgaatcatctcacctaattttttcaggcgatgacgtaatagcttgtgatagtcccgtccgagggcgtaacggctaacgtaacccaccgcggggtctttcagggtgcgggcgaaagcggcattagcgggcaggtagttcattctcacgctaattacgcgcagggtaccgggctggagctcatgggggcgcgcgcgcatcatgccatgacgcgccatccacgccatttcgccgtggtattgtttatccagccaggcctgcagtttaggttcgctggcgctgagatcggtatcggtaataccgacctgctggaaccccaactctgtgccccattgtttgatttgctgcgctaactgattgagatcgaggggctgtgacatgatggaccatacgatgacgaaaaacaccgggagtataccacatatcatctggtcggcggaggcgctacgacgagcggaaaaagaggcggcggatacccttgggctgacgttgtatgaactgatgcgtcgtgcgggcgaagcggcttttgagcttgcgcgcgtccagtatcctgaaagccggcactggctgattctctgcggccacggtaataacggcggcgacggctacgtggtggctcgcctggcacagtcgcgaggcattcaggtcacgctgctggcgctggagagcgagaagccgctgccggaagaggccagcctcgcgcgtgaggagtggctcaacgccggcggcacgattcatgccgccagcatcccctggccggaagatatcacgctgattattgacggcctgctcggtaccgggttacagagcgcgccccgggaaaacgttgcggcgctgatcgcgcgggcaaacgcccatccggctgcggttgtggcgctggatatcccctccggcctgaatgcgcaaacggggacgacgccgggcgcggttatccatgccgctcataccatcacctttatcgcgcttaagccggggctgctgaccggcaaagcccgcgatgtcgttggccgtttgcatcaccacgccctggggcttgagggttggctggcaggccaaacgacggcgctcagtcgcttcgatgcctcgcagctccccggctggctgccgccgcggcgtccaacctcgcacaaaggcgaccacggtaagctggtgattattggcggcgaaccggggacggcgggcgccatacgaatgagcggtgaagcggcgctgcgcgcgggcgccgggctggtgcgagtactgactcaccgggacaacattgcccccattctgaccgccaggccggagctgatggtccatgagctgacgtcccgctctctcgaagagagtctgcactgggcggatgtcattgcgattgggccgggtctggggcagggcgagtggggtaaaaatgcgctacgccaggcggagaattttcgcaaaccaatggtctgggatgcggatgcgctgaacctgctggcaatcaatcccgataaacgtcacaatcgcgtgctgacgccgcatcccggcgaagccgcccgcctgctgaacgtgagtgtggcagaaattgaaagcgatcgcttacattctgcacaacgtctggtaaaacgttatggtggcatcgtggtgctgaaaggtgcaggtacgatcgtggcgagcgaaacgggcgaaatggctattatcgacgccggtaacgctgggatggccagcggcgggatgggcgatgtgctgaccggtattgtcgctgcgttgttaggccagcgcctgacgccgtatgatgctgcctgcgccggatgcgttgctcatggcgaagccgccgatcggctggcggcgagacacggcacccgcggaatgctggcgaccgatctttttttcacgctcaggcgtgttgttaacccggatgtgattgacgtagaccatgattaaccgagtgattcctttacccgatgagcaggcgactttaagccttggcaaccgcgtcgcgcaggcatgcgctggcgcgacggtcatctatttgtatggcgatttaggggcgggtaagaccacctttagccgcggtttccttcaggctctcggtcaccgtggcaacgttaaaagcccaacctacaccctcgtcgagccttacagtctcgataatttgatggtctatcacttcgatctttatcgcctggcggatcctgaggaactcgagtttatggggatccgcgattattttactgacgatgctatctgcctggtggaatggccgcagcagggcacgggagtactgccggacccggatgttgaaattcaccttgagtatcaggcacaagggcgtgaggcgcgcgtaaccgcggtctcctcattgggtgagtctttattggcgcgtttggctaattagcctgaaggacgacgggatgatgtatcgcttaaccagttggctggccgccgcactgatgctgttcagcattcaggccactgcggcaagtttatccgatatccaggtctcaaatggcgatcggcaggcccgcattaccattagctttatcggcgaacctgaatattcgtttaccccccagggcaaacgcatcgtggcgctggatattaaacagactggcgtactccaggggctaccgctgcagtttagcggcaataatctggtaaaaagcattcgttccgggacgccgcaggatacgcagtcgttgcgcctgctggtggatctcaccgccgacggcaaaacccgcgcggtgaaacagcagaacggctctaactacaccgtggtgtttacgattaacgccgacgcgccgcctccgcctccaccccagccggtggtggttagacaggcggaaaggcccgtggcgcagcccgtgcgtccgagcgaacccgcgcgcaacccgtttaaagccgataacgaccggctcaccgcggtgaccagcaccagtagcgtaacgcgtcctgcggcgcgtaccgtttccggcgacgataaagtgattatcgccattgacgccggccacggcggccaggatccgggagccattggtccgaacggcacgaaagagaagaatgtgaccatagcgattgcgcgcaagctccgcgcgctgctgaatgccgatccgcagttcaggcccgtgctgacgcgcgacggcgattatttcatttccgtcatggggcgttctgacgtcgcacgtaagcaaaacgccaatttccttgtctcgattcacgccgacgctgcgccgaatcgcgatgctaccggggcctcggtttgggtgctttccaaccgccgcgcgaacagcgaaatggccggctggctcgagcagcatgagaaacagtcagaactgctgggcggcgcgggcgatgtactggccaacagccagtcggacccttacctgagccaggcggtgctggatttacagttcggccattcccagcgcgtcgggtatgatgtggcgaccaatgtgctgagccagctgcagcggatcggcgatttacataagcgtcgtcctgagcatgccagcctcggcgtactgcgttcgccggatatcccgtcgatcctggtggaaacgggttttatcagtaataccggcgaagagcggctgctgggcagcgatgcttatcagcagcaggtcgcagaggcgatttataacggcctgcgtaactactttatgcagcaccctctgcaatccgcgccgcgcggggcagccgcgcagactgccagcgcaggttcgtcagacgggacgttgttaaattaaggagacggccatgccgattcaggttctaccgccgcagctcgccaaccagattgccgcaggtgaagtggtggaacgtccggcgtcggtggtcaaagagctggtggaaaatagcctcgatgccggggcgacgcgtatcgacattgatattgagcgcggcggggcgaagttaatccgcattcgcgataacggctgcggcatcaaaaaagacgaactggcgctggcgctggctcgtcacgccaccagtaaaattgcttcgctggatgaccttgaggcgatcattagcctcggctttcgcggcgaagctctggccagtatcagctcagtggctcgcctgacgttgacctcgcgtaccgaggagcagcaggaggcctggcaggcctatgccgaagggcgcgatcaggcggtcaccgtgaagccggcggcgcacccggtgggaacaacgctggaagtgctggatctgttttataacacccccgcccggcgcaaatttatgcgcaccgagaaaaccgagtttggccatatcgacgagatcgtgcggcgcatcgcgctggcgcgcttcgacgtgaccatcaacctcagccacaacggcaaggccgtgcgccagtaccgggcggtatcgcaggacggtcagcgtgagcggcgtctgggcgcgatctgcggtttgccatttctcgaacacgcgctggcgattgagtggcagcacggcgacctgaccctcagcggctgggtggccgatccgctacataccaatccgacgctggcggagattcagtattgctacgtcaatgggcggatgatgcgcgatcgcctgattaatcacgcgattcgccaggcctgtgaagacaaactgggcgccgaccagcagcctgcctttgtgctatatctgaagatagatccgcatcaggtggatgtgaacgtccatccggccaaacatgaagtgcgttttcatcagtcgcgcctggtgcatgactttatctatcagggcgtgctgagcgtcctgcagcagcagctggaggtgccgttggcggaagagggcgatgagcccgcgccgcgacaggtgccggaaaaccgcattgcggcgggcggcaatcattttgcccagccggcggtcgcgcgtgaaagcgccgctccccgttaccgggatgagcccgccgcgccgcgttttaataccggaggttcgcgagagtccgccgcctcgggttcatctggcggagccgcctggccgcacgcgcagccaggctaccaaaaacagcagggtgcgctttatcgccaactgctggacacgccggccacggagcgcaaacccctggctcccgcaccggcagcggaaggcctgtcgggtcatagccaaagctttggccgcgtactgacgattatcgatagcgactgcgcgctgctggagcgcggcggtaagttagcgctgctggctctgccggttgctgagcgctggctgcgccaggcgcagctaacgccgggcgcagaggtggtttgcgcccaaccgctgcttattccgctgcggataaaagtgtccgacgaggaaaaagacgcgctcaagcaggcgcagtcggcgctggctgaggtcggtattgaactccagtccgatgcgcaccacgtgacggtccgcgcagtgcctttacccttaagacaacaaaatttacaaatcttgattcctgaactgataggctacctggcgcagcaaaaaaccgtcgacgtcagcaacattgctcagtggatagcgcgtaatctggcgagcgaacatgcgcagtggaacatggcgcaggcgattgccgtcctggcggatatcgaacgcttatgtccgcagctggttaaagcgccgccgggtggtctgttacaacctgttgatttacattcggcgatgaatgccctgaaagatgagtgatgtaactgaggcaagcctgcctaaggcaatatttttaatgggccctacggcctctggtaaaaccgcattggctatcgccttacgtaaagttttgccagtagagttgattagcgttgattcagccctcatctatcgaggaatggacataggcacggccaagcccgatgccgcggagctgagcgctgcgccgcatcgtctgctggatattcttgacccggccgaggcttattccgcggcggatttccgccgcgatgcgctggcagagatggccgatatcgtcgctgccgggcgaattccgctactggttggcggaacgatgttgtatttcaaggcgttgttggaaggattgtcgcctctaccctcggctgaccctgaggtcagagccaagatcgagcaacaggccgcagagcagggatggaacgcgttacaccagcagctacaggaaattgatccggttgccgccgcgcgtattcatccaaatgatccgcaaagactttcccgagcactggaagtttttttcatttcgggtaaaactttaacggagctgacgcaaacgtcaggtgatgctctgccgtataaggtgcaccagttcgccatcgccccggcgagccgtgaactgctccatcagcgcatagaacagcgttttcatcagatgttggcttcaggttttgaagcagaagtgcgggcgctttttgcccggggagatttgcatacggatatgccttccattcgttgtgtcggatatcgccagatgtggtcttacctaaatggcgagatcccgtatgatgaaatggtttatcgaggtgtttgcgccacgagacagttagctaaacgtcaggtgacctggctgcgcggttgggaaggtatccactggttagacagtgaacaacctgaacaagcgttcaacaaagtattacaggttgttggtgctagcctggactgaacgtgtacaattgaacgggtatcgtgcgtaatttttttaagaatcgtaaggttctgagtacaaaacaagcatacatataaggaaaagagagaatggctaaggggcaatctttacaagatccgttcctgaacgctttgcgtcgggaacgtgttccggtttctatttatttggtgaatggtattaagctgcaagggcaaattgagtctttcgatcagttcgtgatcctgttgaaaaacacggtcagccagatggtctataagcacgcaatttctactgttgtcccgtctcgcccggtgtcacaccacagcaacaatgctggcggcggtacaaacaactatcaccacggtggtggtgcgcagggttcttctgcgccgcagcaagacagcgaagacgccgaataaggcagatgctgtttttccacgtcggggagccaggttttctgcgttccccgctggtattttataaggggtttacgcttgtttgaccgttatgatgccggtgagcaggcggtactggtacacatctatttttcgcaagacaaagatatggaagatctccaggagtttgaaactctggcctcttccgccggtgtcgaagcaatgcaggtgattaccggtagccgtaaagcaccgcacccgaagtattttgttggtgaaggtaaagcagtcgaaattgcggaagccgtaaaagcgaccggtgcatcggttgtgctcttcgatcatgccctgagtccggcacaggaacgaaacctggagcgcttatgcgaatgtcgggttatcgatcgtaccggcttgattttagatatttttgcccagcgagcgcgtacccacgaagggaaactgcaggtcgagctggcgcagctgcgccacatggcgactcgcctcgttcgcggctggacccaccttgaaagacagaaaggcgggattggtttgcgcggcccgggggaaacccagctcgaaactgaccgccgcttgctgcgtaaccgtattatgcagatcctggcgcgactggaaaaagttgaaaaacagcgtgagcagggacggcggtcacgcgccaaagccgatattccaaccgtgtcgctggtcggttataccaacgccggtaaatccacgttgttcaatcagataaccgaagccgaggtctatgctgcgaaccagctgttcgccactctggacccaacgctgcgccggattgatgtccctgatgtcggcgaaaccgtcctggcggataccgtaggctttattcgccacctgccgcacgatctggtggccgcgtttaaagcgacgctccaggagacgcgccaggcgacgctgttgctgcatatcattgatgcggccgatgtgcgcgtgcaggaaaatattgacgcagttaatacggtgctcgcggaaatcgaagctgatgagatcccggcgctgctggtcatgaataaaatcgacatgctggatgattttgagccgcgtatcgatcgggatgaagaaaataaaccgattcgggtctggctttccgcccagaccggggttggcgtaccgctgctttttcaggctttgacggaacggctttctggtgaagtggcccagcacacgctgcgcctgccaccgcaggaaggtcggttgagaagccggttctatcagcttcaggcgatagagaaagagtggatggaggatgacggtagcgttggtctgcaggtgcgcatgccgatcgttgactggcgtcgcctctgtaaacaagagccagcgctggttgaatacgtgatttgaccttgcagcttgcctgaagatattgacccctgtggggatatcaaaaacaaatatggagcatatacatggcgtggaatcagcccggtaataacggacaggaccgcgacccgtggggaagcagcaataaccaaggcggcaactctgggggaaatggcaacaaaggcggtcgcgagcagggacctcccgatctggatgatatcttccgtaagctaagtaaaaaacttggcggcctgggtggcggaaaaggtggactgggcggcggtagcggctctcagggacctcgcgggccaatgggcggacgtatcgtcggcatcgttgccgccgctgcggttattatctgggcagccagcggtttctataccattaaagaagctgaacgtggcgtcgtcactcgctttggtaaatttagccatctggttgagcctggccttaactggaaacctactttcattgataacgttcaggcggttaacgttgagtcggtccgcgaactggcggcttccggcgtcatgctgacgtctgacgaaaacgtcgtgcgcgttgagatgaacgtgcagtaccgcgtgaccgatccggaacgctatctgtttagcgtcaccagcgcggacgacagcctgcgtcaggccaccgacagcgccctgcgtggcgtgatcggtaaatacaccatggaccgtatcctgaccgaaggacgtaccgtcattcgtagcgatacccagcgcgagctggaagagaccattcgtccgtacaacatgggtatcaccctgctcgacgtcaacttccagacggcgcgtccgccggaggaagtaaaagccgcgtttgatgatgcgattgccgcgcgtgaaaacgaacagcagtacattcgtgaagcggaagcttacaccaacgaagtccagccgcgggctaacggtcaggcgcagcgtatccttgaagaggctcgcgcctataagacccagaccgttcttgaagcgcagggtgaagtggctcgttttgcaaaaattctgcctgagtataaagcggctccggaaattacccgcgagcgtctgtatatcgaaaccatggaaaaagtgctgagccatacgcgcaaagtgctggttaacgataaggggagcaacctgatggttctgcctctggatcagatgctgaaaggcgccggcgcgccggcggcaaagagcgatagcagtggcgcaagcgatctgctgcgtctgccgcctgcagccagctcaaacagcgccagtaacgcttctacctctacgggaggcaccattatggaccaacgccgcgccaacgcgcagcgtaacgactaccagcgtcagggggaataacgatgcgtaaatctgttatcgcgataattgtcatcgtgctggtggtgctctacatgtccatctttgtggtcaaagagggcgagcgcggcattacgctgcgttttggtaaagttctgcgcgacgatgaaaacaaaccgctggtgtacgcgcctggccttcacttcaagattccttttattgaatccgtgaagatgcttgatgcgcgtatccagacgatggacaaccaggccgaccgctttgttaccaaagagaagaaggacctgattgttgactcttacatcaagtggcgcatcagcgactttagccgttactacctggcaaccggcggcggtgacgtttcccaggccgaggtgctgctgaagcgtaaattctctgaccgtctacgttctgaaattggccgtctggatgtgaaagacatcgtgaccgactcccgcggccgtctgaccctggaagtccgcgatgcgctgaactcaggttctgcgggcacagaagatgaagtcagtacgccggctgccgatgacgcgattgctaaagcggcggagcgtgttgaagcagaaacgaacggtaaggttcaggtgatcaacccgaacagtatggcggcgctgggtattgaagtcgtcgacgtgcgtattaaacagatcaacctgcctgccgaagtgtctgaagcgatctacaaccgtatgcgcgccgagcgtgaagcggtagcgcgtcgtcaccgttcacagggtcaggaagaagctgaaaaactgcgcgcgaccgcggattatgaagtgaccaaaacgctggcggaagccgagcgtcaggggcgtattctgcgcggtgaaggcgatgctgaatcggcgaaactgtttgctgatgcattcagccaggatccaggcttctatgcctttatccgtagcctgcgtgcgtatgagaacagcttccagagcaatcaggatgtaatggttctcagcccggacagcgatttcttccgctatatgaaatcacccacgtcagcgacccgctgataagcaatgagtaagcaaaaaggcgcccgttgaggcgccttttttacaatgttcgcagcggatttgggttcgccaatgggttatgtattttgtttcataaagccggttcataacaatgatgaaataccggagaatatgaattgagcaacgactcacaggggtgagcgacggtggctgtacttaaataaaggtgaataatgaactcaacaatctggctggcactggcgctggttttagtacttgaagggcttgggccattgctttatccgcgcgcgtggcgtcgaatggtcgccacgatgagccaattaccggataatttattacgccggtttggcggaggtcttgtggttgccggtatcgtcatctactacatgttgaggaaaacgattggctgagcgtaaagtagactaatttcccgccttttgagtgcaaaaagtgctgtaactctgaaaaagcgatggtagaatccatttttaagcaaacggtgattttgaaaaatgggtaacaacgtcgtcgtactgggcacccaatggggtgacgaaggtaaagggaagatcgtcgatctcctgactgaacgggctaaatatgttgtgcgctatcagggcggtcacaacgccggccatactctcgtaatcaacggtgaaaaaaccgtcctccatctcattccatcaggtattcttcgcgagaatgtcaccagcatcatcggtaacggtgtcgtgctttctccggctgcgctgatgaaagagatgaaaggtctggaagaccgtggtatccctgtccgcgagcgtctgctgctttctgaagcgtgcccgcttatcctcgaatatcacgttgcgctggatgttgcgcgtgaaaaagcgcgcggcgcgaaagctatcggtacgaccggtcgcggtatcggcccggcttacgaagataaagtggctcgccgcggtctgcgcgttggcgatctgtttgataaagccaccttcgctgagaaactgaaagaagtgatggaatatcacaacttccagctggtgaatttctacaaagctgaagcggttgactaccagaaagttctcgatgacgtcatggcgattgccgacatcctgaccgcgatggttgttgacgtttccgatctgcttgaccaggcgcgcaagcgtggcgatttcgtcatgtttgaaggcgcacagggtacgctgctcgatatcgatcacggtacctatccgtacgtaacctcttccaacaccaccgcaggtggcgtggcgaccggctccggtctgggtccgcgttatgtagactacgttctgggtattatcaaagcctactccactcgcgtaggtgcgggtccgttcccgactgagctgtttgatgaaaccggcgagttcctgtgcaagcagggtaacgagtttggcgctaccaccggccgtcgtcgtcgtaccggctggctggatgccgtagcggtgcgccgcgcggtgcagattaactccctgtccggtttctgcctgactaagctggacgtcctggacggcctgaaagaagttaaaatctgcgtagcctaccggatgccggatggccgcgaagtgacgaccactccgctggctgctgacaactgggaaggcatcgagccgatttacgaaaccatgccgggctggtctgaaaccacctttggcgtgaaagagcgcagcggtctgccgcaggcagcgctgaactacatcgcacgcattgaagagctgaccggcgtaccggttgatattatctctaccggtcctgaccgtaccgagacgatgattttgcgcgatccgttcgacgcataacgatctccaggggcgccgttaaggcgcctcttgtttttgctgttcgcccgccccatttaaataaattagcggcctgagcgctggctggtttatcatcaatagtaattgtctaccgacgcactctgtttttcttttccctgaggttgattgtgcagttaacgagtttcactgattacggattacgcgcgctgatttatatggcgtcgctaccggatggaagaatgaccagcatctccgaagtgacggaggtttacggcgtttcccgtaatcatatggttaaaataatcaatcagctaagtcgcgtggggtacgtgacggcggtacggggaaaaaacgggggaattcgtctggggaaaccggcaaatatgattcgcgtgggtgatgttgttcgcgatctggagccgctctcgttggtcaactgcagcagcgaattttgccatattacgcccgcctgtcgtctgaaacaggcgcttgctgaagccgcgcaaagttttctcaaggaactggataactacacgctggccgatttggttgaaaagaatcaaccgctttataaattattgctggtggagtgacgtaaacttcactggagatgacaacggaggaaccgacatgtcacaagatcctttcctggaccgcgaatctgaaaaatacgctaatccaatcccgagccgggaatttatcctcgatcatttagcaaaacgcgaaaaaccggctagccgagatgagctggcaatagagctgaatattgaaggcgaagaacaacaagaagcattgcgccgcagactgcgcgcaatggaacgcgatggtcagctggtctttacgcgtcgtcagtgctatgcgctgccggaacgtcttgacctgctgaaagggaccgttatcggtcatcgcgatggttatggcttcctgcgcgttgaaggccgtaaagatgacctgtatctgtcgtccgagcagatgaaaacctgtattcacggcgatcaggtgctggcgcagccgctgggcgccgaccgtaaaggccgtcgcgaagcgcgtattgtccgcgtactggtgccaaaaacgggccagattgtgggccgctactttaccgatgcgggcgttggcttcgtggtgccggatgacagccgcctgagcttcgatatcctgatccccccggaacagatcatgggcgcgcggatggggtttgtggtggtggttgagctgacccagcgcccaacccgccgcaccaaagcggtcggcaagatcgttgaggtcctcggcgacaatatgggtaccggcatggcggtcgatatggccctgcgcacccatgaaattccctacgtctggccgccagcggtcgaaaaacaggtcgccggcctgaaagaacaggtaccggaagaggcgaaacaagggcgcgttgatttacgcagcctgccgctggtcaccattgatggcgaagacgcccgtgactttgatgatgccgtgtactgcgagaagaaacgcggcggtggctggcgtctgtgggtggcgatcgccgatgtgagctactacgtgcgcccgggtacgccgctggatggcgaagcgcgcagccgcggcacgtcggtctacttcccgtctcaggtggttccgatgctgcctgaagtgctctctaacggcctgtgttcactgaatcctcaggtcgacaggctctgtatggtttgtgaaatgacgatttcggccaaggggcgtctgaccggcttcaaattctacgaagcggtgatgagctcccatgcccgtctgacctataccaaagtctggcatatgctgcagggcgaccaggatctgcgtgagcagtacgcgccgctggttaagcatattgaagagctgcataacctctacaaagtgctggacggcgcgcgtgaagagcgcggcggtatctcatttgagagtgaagaagctaaattcatctttaatgctgaacgccgcattgaacgtattgagcagactcagcgtaacgacgcgcacaagctgattgaagagtgcatgatcctggcgaacatctccgctgcgcgcttcgttgagaaggccgaggaaccggcgctgttccgtatccatgacaaaccgagtacggaagcgattaccgcattccgttcggtgctcgcggagctggggcttgagctgcctggcggcaacaagccggagccgcgcgactatgcggaattactgacctctatcgccgatcgtccggatgcagagatgctgcaaactatgctgctgcggtcgatgaaacaggcgatatacgacccggaaaaccgcggtcactttggtctggcgctgcaatcctatgctcacttcacctcgccgattcgccgctatcctgacctttcgctgcatcgcgcgatcaagtatttactggcgaaagagcagggacataaaggcaatagcaccgagaccggcggctggcactacagcatggacgagatgctgcagctgggggcgcactgttcgatgaccgagcgtcgtgctgatgaagcgacgcgcgatgtttcggactggctgaagtgtgatttcatgctggatcaggtgggtaacgtctttaagggcgtgattgccagcgtgaccggctttggtttcttcgtccgtctggatgagctgtttattgatggtctggtgcacgtctcttccctcgataacgactactaccgcttcgatcaggtcggacagcgtctgattggtgaatccggcggccagacctatcgactgggcgatcgcgtggaagtgcgcgttgaagcggtcaacatggacgagcgtaaaattgacttctcgcttatctccagcgagcgcgcgccgcgcaacgtcggtaagaccgagcgtgaaaaagcgaagaagggcggcgcaggtaaatcttccggacgacgccgtcaggcgggcaagcaggtaaacttcgagccggatagcgcattccgcaaacagaaaggtcagtctcagccgaaagccgctcagccaaaaggcgagaagaaagcgaagaagccgtcggagaaaacccagaagatagccgcagcgaccaaagccaagcgcgcggcgaagaaaaagaatatcgctgagtagtgcgattccctttccccccgcacctcccgacatcgtggcggggcggggggaagggaacggataacagaacctaaacgagtagataaatgagtgaaatgatttacggcatccacgcggtgcaggcactgctggagcgcgctcctgaacgttttcaggaagtctttattctgaaaggccgtgaggataagcgccttatgccgctgatccatgccctggaagcgcagggcgtggtgattcaggtcgccagccgccagtttctggatgagaaaagcgaaggcgccgttcatcagggaattattgcccgcgtgaagcccggacgtcagtatcaggagaacgatctgccggatctgatcgcctctctcgatcagccgttctttttgatccttgacggcgtgaccgatccgcacaacctcggcgcctgtttacgtagtgctgacgccgctggcgtgcatgcggtgattgtccccaaagatcgttctgcgcagctgaatgccacggcgaaaaaagtggcctgcggcgcggcggaaaacgtcccgctgatccgcgtcaccaacctggcgcgtaccatgcgtctgctgcaggaagagaacgtctggatcgtcggtaccgccggtgaggccgatcatacgctgttccagagcaaaatgaccggatcgctggcgctggtcatgggggcggaaggcgaaggcatgcgccgcctgacccgggagcactgcgacgagttgatcagcatcccgatggccggtagcgtgtcgtcgctgaacgtatcggtagccaccggtatttgcctgtttgaagcggtacgccagcgcagctaatctcttctttccaaataagccattctctggaatggcttatcttcttcagttctgaccgccttctcgctctatccgacgggcaatgtcgagacctctttcaacatagttcaggacctggctcaagggtaattcctctcccggttcatctcccgtttgctcgaggaatttaagctgcgcgcctcgattctttaatactttgatgagattaagaaaacttccaataggattctgctcttccagaatgtcatcgcagattttgttttcatcaaatgaggtgacgtaaccggaagcgttcaggttctgtttgatagcgctcatcgcgagatgaggaagatggtggtggataagcggaatatagttcggcgcattttgccgatcttcaataattaaatgaatcatgaaattccctttctgattgtgagagaactttataacagagttctctgacggaaagtgcgccgttgtccatacttatggatagagccattgaaggagggaaacataatgcactggcaaactcataccgtatttaatcaaccctcgccgctatgtaacagtaacttattcctgtccgataccgccctgcgtgaagccgtcatccgcgaaggcgcgggctgggatggcgatctgctggcgagcattggccaacagctggggacggccgaatcgctggaactggggcgcctggccaacagcaatccgccggaactgctgcgctatgacgcaacgggatcgcgtcttgacgatgttcgtttccatcccgcctggcatttactgatgcaggggctgtgcgctaaccgggtacataatcttgcctggcaggaagaggctcgcgaaggtgccttcgttgcccgcgctgcccgctttatgctgcatgcgcaggtcgaggcgggcaccctgtgccccactaccatgacctttgccgctattccattgctgcagcgctccttacccgagacttttagcgactggctatcgccgctattaagcgatcgctacgatccgcaccttgtgccgggtaatcagaaacgcgggctgcttatcgggatggggatgacggaaaagcagggcgggtccgatgtcctgagcaacacgatgcgagcggagaaaagcgcagaaggcttttatcatctgatcggtcataaatggtttttctcggtaccgcagagcgatgctcatctggtgctggctcaggcgccggcgggcctctcctgcttttttgttccgcgcctgttgccggatggacagcgtaacggcgtacatctggaaaggctgaaagataaattaggtaaccgcgcgaacgccagcagcgaagtcgagtttttcaatgcctgcggctggctggtcggggaagagggcgatggcgtccggcaaattctcaaaatgggcggcctgacccgttttgactgcgcgctgggtagccatgcgctgatgcgccgggcctattcggtagcgctataccatgctctgcagcgtcaggcatttggtaaaaatctggtcgatcagccgataatgcgtcaggttctggggcagatggcgctgcggctggaaggacaaaccgcctttctgttccgcctggcgagggcctgggacaggcgcgacgatgtgcaggaagcgctatgggcaaggctgttcacgcccgccgcgaaatttgctgtctgcaaatccgggatcgcgttcgtcgccgaggcgatggaggtactgggtggctcaggctattgtgaagagagtgaattaccgcgtttgtaccgtgaaatgccggtaaacagcatctgggaaggttccggtaatattatgtgtctggacgtgatgcgggttctgatgaagcagccggcggcgctcgaacttctggcggcggagtgcgcggaagtgaaagggcaaaatcgtcatttcgatcggacgtggcggcagctgcagcagtggctacggcggccgctggaagagcaggggcgggagattacccggctggtctatatgctgggcgttggggcgcagctattacgcttcgcgtcaccgccgctggccgaggcctggtgccgtatgatgctcgacgcgcgcggcggcatgcgcctggatgagcagacgctggatgacttactgttacgggcaacggggcgtggacgacaggcgcctcaggcataaagaatggcctgtacccgccagttatccggctgctgctcctcgtacatctggacgatgcgataccaggaggcgccctgctcatcggcctgcacggcgatagcgtgttcaacatcctgctggctgcccgagatgttgttaacgcaaatcaggccaatttcgttcaggcccgttacgcagtcagcgctggcaaactccgctgactgcgcggaagtattggccgtgacggtggtcaacatcaggctgggtagggtaaaagttcgtttcatcgtcagctccatttcacatagtcctgagggcagtccgttgctaacgttctgcctggttacagctggccgaacgttattatgcacagaagaacgtgaatggatgcaaagcagtgtaaagctggcttaaaggttgaccgctatttacggtacaaaattgcctgcgaataccactggcccggaaccatggtgtcatcaatcattatgatgacgtagtaatccgctttagccgcctcagctttgacctttagcgcagcctcgacatccatcggtgagccgtacattaatacgctcaccgtccccatcttctgcagacccgccgtctgattacgctggatctcttgtggatggtcggttgccggcggcggcgcctttggcgtcccctgtagggcgctacagccggttaaagcgattgccattaaccacggtgcaaacctacgcataaccatatctcgtttcctgttagtcatagtgtagtggtagcctgaatgtcatttccggggaatgttcccaaattgttatcccgtacgcgattttcgaatgaaaatatcgtgaaagcgtaatctggttctcaagattatgaatcatgtgcgaacgagcgacttgagtaataacataacatcacttgagagaaaggagacggtaaatgatcgcactagaaatgcgtaaccttgcgggtggggaggttctccatgcgtacccgcagggcgccgcggatacggcgctgccttgcattgtcttttatcatggttttacctcttctaagctggtctacagctattttgccgttgcgcttgcagaggcggggtttcgggtgattatgcctgatgcagcggaacacggcgcgcgctaccggggagacgaacaggggcggatgcagcgcttctggccgattctgatgaacaattttattgaatttccggcactacaggaggcgattcgggatcggggatggcttgctgacgacaggctggcggtggcaggcgcatcgatgggcggaatgacggcattagggattatgacccaccacccggagctgaaaagcgtagcctgcctgatggggtcaggctatttcagttcgctctcgcaggcgcttttcccttcgccttcgttcgatgcagaacagctggtggcgtgggacgtcagccagcagctggcgaccctggccagccgtccgctgctgctctggcacggcgatgaagatgatgtcgtgccgccgggggaaaccttccgcctgcagcaggcgctgcagcaaaacgcgctggccgacaatttaacctgcctctggcagaaaggcgtccgccaccgcattacgccggaagcgttagccgcgacggtggacttttttcaacgtcacctttaaacgcgaatcacctgtacgccctgatcttcaagctgcttgaggatcgcctcatccgcctgtttaccggtaatcaccaggtcgatttgcccggcctggctaaagagcattccggcgcgttcgccgactttgctgctgtcgaccaggaccgcgagtttgccgacgacgttaagcattttttgctccgccatcgccgtcagcatatcggttttatacagcccttcggcggtcaatcctttgccgctggtgaacatccagtgcccggcatacaggctgttttcgctgccctgcgggctcagggtgatagagtggctgcggttatactgcccgcccataatgatgacgctgtcgtgttcctgatcgatcagatagttggccagcggcaaatagttggtgatgatctgtaccggtttgccgcacagctcctgcccaagcaggaatgcggtagagccgcagttaatgacgatgctttcgccagggttgaccagctgcgaagccgcacgcgcaatccgtaccttctcatcgtggttttgcgcctggtgaatattcattggcgaccagcgcgggcgctgctcgctgatggcttccgcgccgttgcggacttttttcagcctgccgctttcgtcgagtttgttgatatcgcgtcgtgccgtcgccggagaaattcccagccgggaaatcacctgctccacggtgacaaatcccgtttgtgccagcaaatccagtaaaatttgatgtctttgcgcttccgtcatgagcaaatccgattaaaagtgataagcaaagatgatatttgaaatcaggtgaaaatactaatgctgacggggataatttccggcgggcggtcccgccggagaagccttacaggaacgacttaaagggcaggtccggttccatcgtgaagcaatcgtcgaatccgcgcggataatggtattcgaagttgtctttatccagcggccaggtgaattttccgcccacctgccagatgaaaggcttaaagccatactgcagacgatcttttttcatctcccacaaaacgcggatttcctgcggatcggcctggaagtttgaccagatatcgtgatggaacgggattaccactttagcattcagcgactcggccatgcgcaggatatcggcgctggtcattttgtcggtgataccgcgcgggttctcgccataggagcccagcgccacgtcgatctggtgttcgttaccgtgcttcgcgtagtagttggagtagtgggaatcgccgctgtgatacaggttgccgcctggcgttttgaacaaatagttcaccgcgcgctgatccattccgtccggcaggacgcctgcggctttttgatccgcgggtaaggtgatcagggccgtacggtcaaaagcgtcaagcgcgtggatttcaacatcctttattttaaccacatcccctggtttcatcacgatacagcgctcttttggaacgccccagcctatccacaggtcgacgcaggtttgcgggccgatgaacggcacgtcctcggcgcagttctgcatgaccgcggcggccacgttcacatcaatatgatcgttatgatcgtgggtggacagtacggcgtcgatctggcgaatagcgaacggatcgagaacaaacggagtggtgcgcaggtttggctggagtttcttcacgccggccatacgctgcatctggtggcccgttttcatcagcgggttcccgtggctttgcttgccggtaccgcaccagaaatcgacgcagatattggctccgccctcggatttcagccagatgcccgtacaacccaaccaccacatggcaaaggtgcccggcgcaacctgctcttgttcaatttcttcgttcagccagctaccccactccggaaaagtgttcaggatccatgattcgcgggtgatggtttgtactttactcatttttttttcctcacatattatcaaaagtaatcacaatgtgatttgttttgacgaatactggcaccgtttgttcaggattgcaatcctgaaatttgcccttcatgagggggatcgtggagggtaaaaagagggggaggctgacgttatgacatgagttaggttttatttcattgatttaaatatactatttcacagtttgtagaaatgagaattaatacgatggcggattgtgtgattatttgcggcgtgcgtcacatttaatcaaatataatcttgttgtgattatttttgattattagagtgatcgcaacaaccagcctgggcgtagcgtgcgttcagagcgtccaccttctggagtgtgttatggagattctctaccacatctttaccgtgttctttaaccaggttatgaccaacgccccgctgctgctgggtattgtgacctgcctgggctatatcctgctgcgcaaaagcgccagcgttattgttaaagggacgattaaaaccattatcggttttatgctgctgcaggccggctccggcattctgaccagcacgtttaagccggtcgtggcgaaaatgtctgaggtttacggcattaacggcgctatctccgatacctacgcgtcaatgatggccacgatcgaacgcatgggcgacgcctacagctgggtgggctatgccgtactgttagccctggcgctgaatatctgttatgtcctgctgcggcgtattaccggtattcgcaccatcatgctgaccgggcacatcatgttccagcaggcggggctgattgccgtctctttttacatcttcggctacccgatgtggacgaccatcatctgtacggcggtactggtgtcgctctattggggcattacctcgaacatgatgtataagccgactcaggaagtgaccgacggctgcggcttctccatcggacaccagcagcagttcgcttcatggattgcttacaaggtcgccccgtatctgggcaaaaaagaggagagcgttgaggatcttaagctgccgggctggctgaacatctttcacgacaacatcgtctccacggccatcgtgatgaccattttcttcggcgcgattctgctctccttcggcatcgacaccgtacaggcgatggcgggtaacacccactggacggtctatatcctgcaaacgggcttctcgttcgccgtcgctattttcattatcacccagggcgtgcgcatgttcgtcgccgaactttccgaggcgttcaacggtatctcccagcgcctgattcccggcgccgtactggccattgactgtgcggcgatctatagctttgcgccaaacgccgtcgtctggggctttatgtggggcaccatcggtcagctgatcgccgtcggtattctggtcggcttcggctcttccattctgattattccgggctttatcccgatgtttttctcgaacgccaccatcggcgtctttgctaaccactttggcggctggcgcgcggcgctcaagatttgtctggtgatgggcatgatcgaaatctttggctgcgtctgggcggtgaagctgaccggcatgagcgcctggatgggcatggcggactggtcaattctggcgccgccgatgatgcagggcttcgcctccatcggtatcgcgtttatggccgtcattatcattatcgcactggcttatatgttcttcgcagggcgcacgctgcgcgctgaagaggacgcggaaaaacaactggcagatgcttctgctcaataaggagttttgactatgaccgtacgtattctggctgtatgtggcaacgggcaaggcagttccatgatcatgaagatgaaggtggaccagtttttgacccagtcaaatatcgatcacacggtaaacagctgcgcggtgggggaatacaaaagtgaactcaacggcgcggacatcatcatcgcctccacccatatcgccggtgagattagcgtctccggcaacaaatacgtggttggcgtgcgcaacatgctctcgcctgcggattttggcccaaaactgctggaggtgatcaaagcgcacttcccgcaggatgtgaagtaaggacgccaaatgaaattacgtgattcgctggtggagaacaactccatccttttacaggccgacgccagcacctggcaggaagccgtcaagctgagcgtggatttactggtgaaggcggatgtcgtggagccgcgctactaccaggccattctggatggcgttgctcagcacggcccttattttgtgattgctcccggtctggcgatgccgcacggtcggccggaagagggggtgaagaaaacgggctttgcgctggttacgctgaaaacgccgctggttttcaatcatgaggataacgacccggtcgacatcctgatcaccatggcggccgtggatgccaatacccatcaggaagtcggcatcatgcagatcgtcaacctgtttgaagatgaagccaattttgaccgtttacgcgcctgccgctccgcgcaggaagttctggaattaattgataacgctacggcagcggccgtttaaaaggaacaccaaaatgtcattacctatgttgcaggttgcgctcgataaccaatctatgtcttccgcgtatgaaacgacgcgcctgattgccgatgaagtggacattattgaagtcggtaccattctctgcgtggctgagggcgtacgcgccgttcgcgacctgaaggcgctctatcccaacaaaatcgtgctggcggacgccaaaatcgccgatgccggtaaaattctctcccgcatgtgctttgaagccaacgctgactgggtcaccgtgatctgctgcgcggacatcaacaccaccaaaggcgcgctggacgtggcgaaagagttcaacggcgacgtccagatcgaactgaccggctactggacctgggagcaggcgcaggagtggcgtgaagcgggagttcagcaggtggtttatcaccgcagccgcgatgcccaggccgccggcgtagcgtggggcgaggcggatatcagcgcgatcaaacgcctgtccgggatgggctttaaagtcaccgtcaccggcggcctggcgctggaggatttgccgctgttccaggggattccgatccacgtctttatcgccggtcgcagcattcgtgacgccgcttccccggtggaagccgcgcggcagtttaaacgttcgatcgcccagctgtggggctaaggagcggctatgctgtcgaaacctattccgctcggcatctatgaaaaagcgctccccgccggggagtgctggctggaacgtctgcggctggctaaggcgctcggttttgatttcgtcgaaatgtcggtcgatgaaactgacgaccgcctggcccggctcgactggagccgggagcagcgcttcgcgctggttaacgcgattgcggaaaccggggtgcgcgtgccctcaatgtgcctgagcgcccatcggcgcttcccgctcggtagcgaagacgacgcggtacgggcgcagggcctggagattatgcgcaaagcgattcggctggcgcaggatgtggggattcgcgtaatccagctggcgggctacgacgtctactaccaggaagccaataacgagacgcgccgtcgtttccgcgatgggctaaaagagagcgttgaaatggccagccgcgcgcaggtaacgctggcgatggaaattatggactacccgctgatgaactcgatcagcaaggcgctgggctacgcccactacctgaataatccgtggttccagctctatccggacatcggcaacctttccgcctgggataatgacgtacagatggagcttcaggccgggatggggcatatcgtggcggtgcacataaaagacacgaaacccggcgtatttaaaaacgtgccgttcggcgaaggcgtcgtcgattttgaacgttgtttcgaaacgctcaagcagacgggctactgcggcccgtatctaattgaaatgtggagcgaaacgaccgacgatccggccgccgaggtcgcgaaagcgcgcgattgggtgaaggcgcggatggccagcgccggtctgctggaggtggcataatgcaaacgctgaaacggcaggttttcgacgccaatatggatttaccgcgctacggcctggtcacttttacctggggtaacgtcagcgctatcgaccgcgaacgcgggctggtggcgattaagcccagcggcgtcgcctacgagaccatgaaagcggacgatatggtggtcgtggatctcgaggggaacgtggtggaaggacgctatcgtccttcttccgataccgccacgcatctggcgctgtatcgccgctatccgagccttggcggcgtggtgcatacccactcgacgcacgcgacggcctgggcgcaggcgggtctggccattcccgcgctggggacgacccacgcggactacttctttggcgacattccctgcacccgggcgttaagcgcgcaggaagtggcggaggcttatgagctgaacacgggccacgtgattatcgaaacgctgggtgacgttgagccgctgcatacgccgggcatcgtggtctatcagcatgggccttttgcctggggcaaggatgcacacgatgcggtgcataacgcggtggtgatggaagaagtggcgcggatggcgtggattgctcgcgcgatcaacccgcagctgaagcccatcgatagctggctgatggacaaacattttatgcgcaagcacgggccagatgcctattacgggcaaaagtgaaacaggtgctccggagcatttcatctttatgatgaatcaaccggtctgctccggagccatttttagttttgctgataagccgacggcatgcagcgcataccaaccagcgtcacaacgcagattatcgcgccggcgtaaaacgtcgaggcggcgcccagaacttcccacagcacgcccgcacctgcgctggccagcagcagggcgatgccgctcattaggttgaacatcccgaacgctgttccgcgcagttcaggcggggcggtgtgcgccaccatcgccgccagcagaccctgcgtcatgcccatatgaataccccacagcgcgacgccggctaaaagcgtgctccagtggctgctgagcgccagcacgatatcggcggcgatcagcaccagcaggccccactgcagcattttgctgtggctcatgctgtccgatagtttcccgaatggataggcggtcaggctgtaaaccagattcatggcgaccatcaccagcggaatagcgaacagcgggatcgccatctgctgggcgcgcaggaccagaaaggcttcactgaagcgggcgagggtaaaaatcgagccgatagccaccacccaccagtaggcggcggaaagcttcttgagattctcgcggcgcagggggttagtgcgtttctggacgaccgccgtcctgggctcttttaatccaaagcccagtaaagcgatagagagaatggcggggatcgccgcgacccaaaaaatagactggaaatcgttatcccagagaaacatcagcgcgacggcaagcagcggccccagaaaagcgccgatggtatccagcgactggcgcagcccgtaggcggctccgcgaatttccggcggtgtgacgtcggcgaccagcgcatcccgcggcgcgccgcgtatccctttgcccacgcggtcgatcatccgggcgctaaacactacgcctgaggtgggcgcgatggcgaaaagaggcttgctcagcgcacccaggccatagccgagcagcgccagccctttacgtttgccgacataatcgctgatgacgccggaaaacaccttcagtatcagcgcggtggcttccgcgacgccttcgataatgccgataacaatgacgctggctcccagcgtggtggccataaatagagggagcaggctgtggatcatttccgaggaaacatccatcagcaggctaacgccgccaagaacccaaaccccttttgggatacggcttagcgtggcaaaacgcggaaccatgaagcactccggataatcatgcggttaaagagtgattaaatcaggttacgctggcgctgataagtcacgagaaaaaataattctcaattgcattaaggcgcgattgtgcgggtatgaccgccgggcaatgccatcgttggcttccccctgcaacgggaagaagccaacgatccgggaaaactagcggtaaatggcggcactggcgtgaatggcgccgtcgcttcccggttcatgaatgaggatcggctggaagtacttcgctccctgagcatcgctctgctggctaagcgcctggtcggcttcctgctcggtggcgatgttgtggttgatatagataacgccgaggctctgcacatcgtccatgttgcgggcctggcgggcatcgattttaatagcagccagcgcgttggcgctcaacaaaagcgctgccatcatggttatgaggatgtatttcatcacctacctccttatgacgctcctgacgttcacccgcttccctggggtatggattgcttctgatctaagtgtaatctctgcctgtctggcgtatcgcgaccatttctgatgcagttgttcaaaaaattgtcgcttccgtcgttgattaattttaaatcactggcttaaggccacttcgcgcttagtgcgaattatttgcacaatttacttgtcttaaaccccgctcgcccgtattatgacgcgtcaatttttcagccgccctttaacacgttccttgcctccatgggccgcggctgacccagacaggaggctgaataatccgtaaggagcaattcgatgcgtcattacgaaatcgtttttatggtccatcctgaccagagcgaacaggttccgggcatgatcgaacgttacactggtgcaatcactgcagcagaaggtacgatccaccgtctggaagactggggccgccgtcagctggcttatccgatcaacaaactgcacaaagctcactacgttctgctgaacgttgaagcgccgcaggaagcgatcgatgagctggaaactaacttccgcttcaacgacgccgttatccgcagcatggtaatgcgtactaagcacgctgttaccgaagcatctccgatggttaaagcgaaagacgagcgccgtgagcgtcgcgaagatttcgccaacgaaaccgcagatgattctgaagctggggattctgaagagtaatcctgatgaccaaccgtctggagctgtccggcattgtatgcaggactccacttcgtaaggtcagcccgtcaggaattccacactgccagttcgtgcttgagcatcgttcagtgcaggaggaagccggttttcaccggcaggcatggtgccagatgcccgtgataattagcggacaccagaaccaggccattactcacagtataacggtcggtagcgcagtaatcgttcgagggttcatctcttgccacaaggcaaagaacggcttgagcaaaatggttctgcatgccgagcagattgaattgatagattctggagactagccatatggcacgttatttccgtcgtcgcaagttctgccgtttcaccgcggaaggcgttcaagagatcgactataaagatatcgctacgctgaaaaactacatcaccgaaagcggtaagattgtcccgagccgtatcaccggtacccgtgcaaaatatcagcgtcagctggcacgcgctatcaaacgcgctcgctacctgtccctgctgccgtacactgatcgtcatcagtaatcggtcacggtccattaatacgactttgagaggataaggtaatgcaagttattctgcttgataaagtagcaaacctgggtagcctgggtgatcaggttaacgttaaagcgggctatgctcgtaacttcctggtaccacagggtaaagctgttcctgctaccaagaaaaacgttgaattcttcgaagcacgccgtgctgaactggaagccaaactggccgaagttctgggcgctgctaacgcacgtgctgaagcaatcaacgcactgggcaccgttaccatcgcgtctaaatctggcgacgaaggtaaactgttcggttccatcggtactcgcgacatcgctgacgctgtaactgcagctggcgttgccgttgctaagagcgaagttcgtctgccgaacggcgttctgcgcaccaccggtgagcacgaagtggacttccaggttcacagcgaagttttcgctaaactggttgttaacgttgtagctgagtaattttttactcaactcacgtcgagacgccggccttgtgccggcgttttgcttttctgtctttgtcgaatcttttcctggtatggtggctattcttagcaactttctggataataaaataaaacactattttatttctggtgaagtgaatggacgcaccctcgattttttcccgcaagaaagtggcttatgcctgcgcaaccctctgctgtctgctgtggggaagctcctatccggcgattaaaagcggctatgaactgtttcagattgccactgatgatgtgccgtctaaaatcgtctttgctggctatcgctttctgtttgccggcgcgctgctgctgctcttcgcgctggcgcagcgtaagccgattgcccgcttgaatccccgtcagtgcgggcagctggcgatactgggcgtcacgcaaacctctatccagtatgttttcttctacgttggcctggcgtttaccaccggcgtgaagggatcgattatgaacgccaccggtaccttcttcagcgttctgctggcgcactttatctatcagaatgacaggctgagctacaacaaagccatcggctgtattgtcggctttgccggcgtgatgctggtgaacgttaatcgttcattgagcgattttagctttgtctggcagggtgacggctttgtggtgctggcggcgtttatcctgtcggcggcgacgctgtacgggaagcgcatttcgcagacggttgacccgacggtgatgaccggctggcagctggcgtttggcggtctggtactggtcggcggcggctatctgaccggcggcacccttgaggttcacagcgccgctgctgcgctggttctggcttatttgacgctgctctcttccatcgcttttgcgctatggagcgtgctgctcaagcataaccgggtgagcatgattgcgccgttcaactttgtggtcccggtcgccggcaccgtactgtcggccatcttcctcggcgagaatattcttgaactgaaatatgcggttgcgctggcgctggtgtgcgccgggatctggtgggtgaataagccggggacaacatccgggaaatcgccacagcaggccgggtaagctacccggccgtgaggcctaacggacgcgaataaagctgccgttcgactggcgggtaaacagcacctgctggccgccgccggtatcgatagtcaacccggtgaccacgccgctggcgttctgacggatctgtaccgtctgcccggtctgcagtgagcttagcggtttaccggcgccttccacctgggccatggcgtaaacgtcagtcggcggcaggttgtggtcgcggaacagctgcgcgagagttttccccgattcaatacggtaggtccgccactgctgctcgatgccgggagtcgactgcggctcctgataaggctgagatgcggtctgctgctgcggctgatccggctgctcatcctgaatcggctccggtgcgaccggcgccacctgatcggcatcgttgaccggcggcgtgttggtgatgggcggcagcgggaccgcctgattgccggaagagggctgcgactgggattgcaggttgagattcgcctcgcggctggcctgaaccgggctgctgttatcctcggaagggagcagaacgccgataattaccagcagcgccccggcaatgatgccgcggcggtgcatcggcggtagcggatccatgaggcgaaaatgatccggggcgtgccagatcttcgccagggtagatgtcagttcaaagcgcccgggcatggctttcctcctgctccgcatatttttatcctgctctctctagagtatagatggctaacttcctgaaggacgagacaaagctatgtttcgtgaggttaaccttatctctctattgtttctgtttcccttagatttgtcatcatccaggcgacaaagttttacccgtcgtgctatggctgatatgcttcccacctcttttctccgctcgccgcctttcgcaatttgaaggcccgggagcatgagaatcccaccaaaaaaggaacaaagatggcaaccccaacttttgacacgatcgaagcacaggcaagttacggtatcggcttgcaggttggacaacagctgagcgaatctggcctgcaggggctgctgccggaagcgctggtcgcgggtattgctgacgcgctggaaggtcaacagccgcaggtgccggtggaagccgttcaccgcgcgctgcgcgaaatccacgaacgcgctgacgccgtgcgtcgcgagcgtttccaggaaatggccgcggatggcgagaaatacctggaagaaaaccgcgagcgcgaaggcgtgaacagcaccgagtctggcctgcagttccgcgttctgacccagggcgaaggcccgatcccggcgcgtactgaccgcgttcgcgttcactacaccggcaagctgatcgacggcaccgtcttcgatagctccgttgcgcgcggcgaaccggctgaattcccggtgaccggagtgatcggcggctggattgaagcgctgaccctgatgccggtgggttccaaatgggaactgacgattccgcacagcctggcctacggcgagcgcggcgcgggcgcatccattcctccgttcagcaccctgatttttgaagttgaactgctggatattatctaaacagcaggtgcttcctctcccgtacgggggagggggccgctttaaatagtgtaaaacccttaagttgagcgtttggtggagctttatattgcatatctgcttgatgggtgtatttttgtgagctgtttcgcgtaaccggagtgatataacactcactttaaacatataattaacattatatctaaatcatagtattcatccctccgattcttacctaatatcgataaaccctcgttccggggttaatacgaatgaagggccagtagagcccgaacaacacagacaggtacaacaggaaaaaatcacatggtagatcaggtaaaagtcgctgccgacgaacaggctccgactgaacaatcgctgcggcgaaatctcactaaccggcatattcagcttattgctatcggtggtgcgattggcaccgggctgtttatgggctcaggcaaaaccatcagccttgccgggccgtcaattatttttgtttatatgatcatcggctttatgctgtttttcgtcatgcgcgccatgggcgaactgctgctatcgaatctcgaatacaagtcgttcagcgattttgccgccgacctgctgggcccctgggcaggctattttaccggctggacctactggttctgctgggtggtaaccgggatggcggacgtggtggcgatcaccgcctacgcgcagttctggttcccgggactctctgactgggtcgcctcgctggcggtcatcctgctgctgctgggccttaacctcgccaccgtgaagatgttcggcgagatggagttctggtttgcgatgatcaaaatcgtcgctatcgtggcgctgattgtcgtcggcctggtgatggtgatgatgcacttccagtcaccgaccggcgtagaagcctctttcgcccatctgtggaatgacggcggctggttcccgaaaggcatcagcggattctttgccggcttccagatagcggtcttcgcctttgtgggcatcgaactggtgggaaccacggcggcggaaacgaaagatcctgagaaatccctgccgcgggcgattaactcgattcccattcgtattattatgttctacgtctttgcgctgatcgtgattatgtcagtgacgccgtggagctccgtcgtgccgtcaaagagcccgttcgttgagctgtttgtgctggtcgggctgccggcggcggcaagcctgatcaacttcgtggtgctgacctcggcggcctcttccgctaacagcggcgtgttctccaccagccgtatgctgttcggtctggcgcaggacggacaggcgccgaaaatgttcgccaagctgtcgaagcgcgcggtaccggcgaaaggcctgaccttctcctgtatgtgtctgctgggcggcgtggtcatgctgatggtcaatccaagcgtgatcgcggcgtttaccatgattaccacggtgtcggcgatcctgtttatgttcgtctggacgattatcctgtgctcgtatctggcctaccgcagaaagcgtccgcagctgcatgagcagtccaaatataagatgccgctgggcaaactgatgtgctgggtgtgcatggcattcttcgtctttgtgctggtcctgctgacgctggaagccgatacccgcgaagcgctgatggtgaccccgctgtggtttgtgctgctcggcgcgggctggctgtttgccggcaagaagcgcctggcgaaataaaaaatcttcggcagcggtttttaacgttgcttgcaacggtccgtcataaaaaaggccacccggggtggccaataagactgacaatgtcgagggcgcctgcgggcgcctttttatttactttccggcgagggcacgcgggaacagtacgttattttcaaggctgatgtgctccatcaggtcatcaatcagctcgttgatgccgttgtacatcgctttccatgtagtgcaggcttccgccggcggcgtcacgttctgcgtgatgtgcttaatcacctccagcagctcgcccgcttcatcatgctcgctttccatgacgctgataggaccgccggcctgcgttcccatgccctgtttgatcatcgggaacagaatctgctcctctttcatcatatggctggaaagctcctggtgcagcatggtcaggtacttggttaagcctttcggaacgttgggcttgtcggcgtgaacgcgctcgactttagtggcctgtaaaatcagctccggcagctgctcgcgatgccggtcgtgatagcgaacgataatgtgatcgatgatttccgcatagggcgcagcccgccagtcgcgctctaccggctcttccgccagtttggccagctcggcttcaatcaccgcgacgtccagctctttgcgagacgccgcgcgctctagcgtctgtttgccgccgcagcagtagtccatatcgtattgacggaacagcgcggaggcgcgcggaatcgtcagcgccagctcgcctaaaggttggtcacggaaagccatagcagttacctcgtcatcaagaatataagttgtattttaaatgcatcttatgttcctgggaatacccctttaggataccaggctattttttctcgctgaccagctcctgcagcgcgggcttttccgggcgggcacgcacggcggacaccacgccgagcaccagcagcaggataccgctgaaggtgagaagcgggggcaggctctggcgcagaataaaggtatacagcagtccggcaagggtttcgaagacgatcagcggcccgaggatcaccgttggcagacgctggctggcaacgttccagcaccacgcgccgacccatgaacagaaaatagcgatcgccagcatcagggtgacaaacaccgccgggcgcgggccgaaggggagcggaaagtccgcgtgctggccgtgcagccacccgcaggcgataaggtatccggccagggataccggcagggtcaccagcgcctgcgcggtggcccacatcatcggcggtttatccggattttcccgcagccagcgggcgttgcgcagcgcgtaccaggcccagcacaccaccgagatcagcgccagcgcgataccggagccgtagcgccacgggctgaaatcgggtaagccctgatgcagctcggcgatattgacgcacgtcaggccgagggcaatacagaccagcgccgggaacaggcgtcgccacggcagcttaccgtcgcgctggctatagagcaggttggcgaaaaccggcagcacaaccggcagggtgccgataatcatcgtcgataccggcgcgccggtacgctgaatcgcgctggccaggcagacgtaatagattaagttgcccatcatggtcagccccagcgccgtccaccagtctttcccggtgagctggcgcagccgcgcgcggcccagccaggccagcggcagggcgatcagccccagcgccagatagcgccccatcgactgtaaaaccgccgggtattccggcaccagtaaaggacccacgaatatcaatccccacatcagccctgccagcagggcgtacagcacaccactaatcatcacgccttccattactcttttcgttggcaacagtgtaggcgagccaaaagcgggaatattgtatgaggttgcgcattagcgcgggagaacctgcttttgataacgcaccggcgtaatgccgtagcggcgggtgaacgcgcgggtcaggtgcgactggtcggtcagcccggcggcgagagcgacgtcggcggcgggcatgccgtgggtgagaaacgctttagcgcgccacaggcgaatcgccatcagcatctggtgcggcgtaacgtggaagtgcgctttgaactggcgctggaaatggtacgggctcagcgccgccacctgcgccagctcatcgagggtcaccgtacgcatatagttatcgtgcagatagtcgcgcacccgctcgaagcggtggcgggcttcgggcagcgcagcggcgtgatgggcaaacgggcggaaggtatcgatcaaatccagcagcagaccctgctgcgccagcggatcgtcagtatgccacaggccgtagatgagattgccgatttgccgggagcgcaggggatcctgacgcaccacctcgctgaaccaccagtggcgcacgccggtcacctcttccagcgtatccgggtcgagataaatcatccgatagcgccagccgtcggcggtctccgcctcgccggtgtgcagttcatcgggattcatggtgacgatagagttgaccgaagccacgtgctggctgccgcgatagcgaaaacgctcggcgccgagctctatcgcgccgataccaaaggcttcatgggtgtgcggttcaaaggcgtagcgggagatatgggcatggtacagctcaacgccgggcagctgcgccagatggcgaaagcgcgcgctgtctctttcatcattaaactgttccggtacgccttgcatgcgataactcccgacggacatccgtacattattgaggatggcccgccgggatgctacaaaaattaaccactatgtaacagttacagaatgcctttgacgctctctgccagcgtcgtggttgggcgaccgatgagcttactcagggtgcggctatcgtcgaacagaccgcctttggacgcgccggtatcagaatccgccagcatgtcagccaggccagcgggcaggcctacgcccttcagcgcggcggcgaagtcggcttcgctgaggttttgatacaccacgtttttaccgctttgtttgctcagctcagcggcaagttcgctgagggtccacgcttcatcgcccgccagctcgtacacttttccggcatggccctcttcggcgataacgcgagcggcggcggcggcgtagtccgcgcgggtggcggaggcgattttgccgttaccggccgcgccgataaatacgccatgctcaatcgacggcggcgcgctggcaaggtagttttcggtgtaccagccgttgcgcagcagggcatacgcaatgccggagtcggcgagcattttctcggtggcgatatgctcatccgccagccccagcggggaggtatcggcgtgcagcaggctggtgtaggcgataaatttcacgccggcggctttcgccgcgttaatcacgttgcggtgctggacggcgcgctggccaacttcgctggacgagatcagcagcagtttgtccacgccctgcagggcggcggtcagcgcggcttcatcgctgtagtcggcctgacgaaccactacgcccttttggctcagcgattcagccttcgccgggttgcgcacgatagccacaacctggcctgcggggacggtagttaacagattttccaggacgtgctggccaagctggccggttgcgccggtaattgcgatcataggtcttctccttcgtgttcattggcagttgtggtaagctaacaccttaactaacttttagtaagtacgtacaaaaaggtaagtatgaatatggcgaatctgacgctgagcgagcagctacgcaacggcaacctgtttgccgaacagtgcccctcgcgggaagtgctcaagcacgtgaccagccgctggggcgtactgattttggtgtccctgcgcgatggcacccatcggtttagcgatctgcggcgtaagatcggcggcgtcagcgaaaagatgctggcccagtcgctccaggcgctggagcaggatggctttcttaaccgcgtgtcgtacccggtggtaccgccgcacgttgaatatagtctgactccgctcggtgagcaggtgagcgagaaggtggcggcgctggcggactggattgagctgaacctgcccgcggttctggcgaaccacgaacaggtagcctgaggaggatgtcaggatagccccggtaagcgcagcacaaccggggaaccggcaattatttactcaaatccagctgataaatggcaaagccgatatcgtcggtagccacctggcgcatcgggtattgcgctttctctttgataaacgccgcggccttatcgcccggtgaggtttcaaagcgaatatccagcggtacggtgctgtggatcggcgccaggcgccagttgttatccgccgccggatggatctcgccgtttttcttcgactccgcgccaatccacgccgccagcaccgagcggttttcatccggcgaggcgaacgcgatatgatcctcgccggtgccctggaatttaccgccgtaagcgcggtagttattggtcgcgacgaggaaagtggctttcggatcgattggcttgccgttaaaggtcaggtttttaattcgctcggcctgcggattaacgggctgacattcgccgtcatagcgcgccggctgggtgatatcgatctggtagttcacgccatcgatgacatcgaagttgtaggtgcgaaagccgtcccagttaatcagcgactgcggcttactgctgccggggtcaatctgattgaactgcccggcggagcactccagccactctttaacctctttaccgctgactttcatcaccaccagggtgttgggatacaggtagaggtcggcggcgttgcggaaggtgagctgccctttttccacttcaacaaagctggcggggtcatttttgcgtccgccgactttaaacggcgcggcggcggagagtaccggtagtttcgccagatccgggtcgccctgaatatagtgctcaacgtaagccttctgggccatattgaccacctgcacggtcggatcgtcctgcaccagcgccagatagctgtacatattgtccgaggattgaccaatcggtttgccgacaaactcgcgggtggcgtcatggtcggcttttagtaccgccaccatgttgctgtcttctgccgccagcgatttcttcgccaccgagtcgtagatcgggcgcgcttcggctttcgctgcgctgacctgccatttaccgctgtcgttgttcagaaccagatcgaccaccccaaggtgatcgccccacatgcccggcattacagccggtacgccgttcagcgtacctttcgcgatatctgcgcctttgataccggcaaaatctttgctcgggaagacggcgtgcgcgtggccgaacataatggcatcgaccccaggcacctggcttaaatagtaaacggagttctccgccatcgcctgatacgggtcggcggaaaggccggagtgggcaatgaccaccaccacgtccgcgcctttctcacgcatttccgggataaacttgcgcgcggtggcggtaatgtcgttgacggtgactttgccgctgagattggctttatcccaggtcataatctgcggcggtacgaagccgatatagccaatgcgcagggtctgcgttttgccgtcgctatcctgtacctgggtatcctgaatcagataaggcgtaaacatcggttggccggttttggcgtcaataatattggcgttcacgtaggggaattttgccccggccagcgctttgtgcaggaagtcgagcccgtagttaaactcgtggttgccgaggttacctacgacataatccagggtattcatcgccttgtagaccgggtgaacatcaccttctttcagtcccttcgccgccatatagtcgcccagcgggctgccctgaataacgtcgccgttatcgaccagcacgctgtttttggcttcctggcgcgctttctcaatcagggttgcggtgcgcaccaggccaaatttttccgtggcgctgtctttgtaatagtcaaagtccatcatattactgtgcagatcggtggtttccatgatccgcaaatcgaccgtcgccgcatttacgctggcggcgatcagcgtggccagcagcgttgcgctaaacttaatcatcagtggcgtccttttttatgagcaatagcacagaagaaaatgtatttacattctgttgcttacagaaatgtgaatcatgccagaaaagcggtgaaggaaaccgccatcgttatcacagatagcggaactcacaatgatgcgatataaataaaacaacgagttaacgccactgtaaccagacgaggtggagaatgttagaacaagtatgtcagctagcacggaacgcgggcgatgccatcatggaagtttacgatggaaaacagccgatggacgttgccagcaagaaggacgattctccggtcacggccgcggatattgcggcgcacaaggtgattatcagcggcctgctggcgctgacgcccgatattccggttctgtcggaagaggacccgccggcctgggaggtgcgccagcactggcagcgctactggctggtggacccgctggacggcaccaaagaatttatcaagcgcaacggcgagtttaccgtcaatatcgccttgattgaaaaagggaagccgatccttggcgtggtctacgcgccggtgatgaaggtgatgtacagcgcggaaaagggcaaagcgtggaaagaggagtgcggcgttcgcaagcagattcaggtccgcgatgcgcgtccgccgctggtggtgattagccgctcccacggcaatgacccggagctgcaggagtatctggagcagcttggcgaacaccagaccacctcaatcggttcgtcgctgaagttctgtctggtcgccgaagggcaggcccagctttatccgcgcttcgggccgacctccacctgggacaccgcggccggtcatgcggtcgccagcgccgccggggcgcacgttcacgactggcaggggcgtacccttgattacacgccgcgtgaatcgttcctcaaccccggcttccgggtctctatttattgagcagcttgtgcagcagggcaaccacctgctgcacctcttcctggctaagcgcgccgtctttagcccactgtacgcggccgtctttatccagcaccacgatggccgaactctcttcattaagctgccacgctttgcggaccacaccgttgctgtcgacgataaactgcgaccaggggtagagctgcttgttgctctcaatactgctgcggacaaacatgcctgaacccgggatagcgtcatcggtattgacgatagtggtggtttgatagcgatcgtgcgggagcttcgcgcttttaatcgcttcaatcagggtcgcgtttttttcttttgccgacgagcgcccggcaatatgctgcacgacgcgcactttccccaccagctgcgcgctattccagcttttatagctaaacttatcgttgttcagtaccagctccccccgctccgcgacgccgaccggcgcaacgcgctgaccatcgacaaagttatgcgccgacgccatcagcgggaacaggagacatgaaacggccagtaatctacgtagggtcatggtgtttccttttattatctgtgcaggtgatccgaccacttggtctgctttaatcataagtgcgatttatgggcattacccgcaatgatggtgccagtttgcgtgttgacgcacaattccgtctaaaatcggcgacttatactaccttcatcggatgcctgaaacgaaaactctgaattattgtcatcataaggtaaataaacttatacaaactgggtatcactcagattctggactatagtttcagggcattaaaatttgcgattccggtacgtgggctaactgtggcaccacaggagcgtaaccctggcaggagacaacaatgaaaattttccaacgctacaacccgctacaagtagcgaagtacgtgaagatcctgttccgtggacgtttgtatatcaaggacgttggcgcttttgagtttgataagggcaaaatccttatcccgaaggttaaggacaagctgcatttgtcagtgatgtctgaagtcaaccgtcaggtgagccgtctgcaaacagagatggcatagcctgaaaagaggtatgactacacggtaaaaaggcggctccctaagggagccgttgatgtttctggacctatcccttcatttccgcatagcgtttacggtactcgcccgggggaatgccgttatgtttacggaaaatgcgcgtgaaatagaccgggtctccgtaacctaccgacagggcgatcttgttaagcggcagggaggtgctctggatcagccacctcgcgcggttgatgcgctgcgcctcgcgccaggcgtaaaccgtttgccccagctcatttttgaacaaatgcgccagccgcgaaggggagagaaaaaccatcgccgccagggtctcgatcttcatctcctgggcaatatgttcgttaagatagtcgcacacggcgttaatccgcgggtcgtgggcgtggcggttgctgatcggctgtcgctgaaagcagttcaggatcaggcgctccagcgcattcatcgccagcgcctccgacagcggggcggaagcggagtagtggcggataacttcatagaacagatcgcgcagactctgcagctgctcaggatcgttgaccgtggttttaccaatgccgtgggtcgtttgatcccattttagccagtctatccagtagggccgggggatgaagtagatccataaatgatcccagtattcgctgtgttcgtcccgtccgtaatggtggggaacgccgggcgggaagagcagcagatcgttttcacgacacagaagggagccgtctcccgctttcgcgcgcgcctggccgcgcagcgtcagattgatgatgtaacctttcatcccctgcgggcggtttatgtagtagtccagctttgagccgcgggtgatgggggtaaagccggcgacgacccaggcgttgaaggtaaaggtcttcatcaatggcgagaagttcagtagctcattgatatccagttccatcgtttctcccgcccgagcgccgccgcccgcttaactttcgatgatagtaaattcccatgctttgaggcgcaacggctggccgcagctaactttttccccgctcaacagcgcgttgcccgatgtctcgctgataaacgcctgcggttcgccggagtagttgaacaggaagtggatgctgttgccgtcgcggttgcgcatctttttgaccaccagcggatagcggtaggccgatgtacgtgaacgcagatccagtcctgcggtcagccgatcgaacagctggctaatcagcgttttctgcggcaggaagccaacgtaaatggcccgaccctgagcgtaatccgcctcggtggcggcggcatagtcgccccatgccggatgctgatagcgcagtagcgtacgggtaccggcgtccggcgtcagcagctccatccacagctcggcctgattgtcttgacggcaatcaatgtccgcgctgcaggcgcgtaccgtggtttcttccggcagggtgaattgactgtagctcacgccgcagctctcgcgcaaaattcccggctgcgcgccgctgcgcaccttcacgttttcatcgctaaagcccgatttaaagccgatcagcgctctgccgccctgttcgatatagcggttgatgcgcgtcagcaggccatcatcggcggcgtagagtccgggtacgatcagcgcgcggtagcgcgcggtttcctcgttaacgtcgtggataatatcgaggctgatattgtggtcgtacagcgcatcgtggaagcggcggaaaatatcgttataaatattgccctgcgcgtcgccggggcggaactggttaagggcgtccatcgcctcattgcttatcagcagcgcgacgtcgttttctgccttcagctccgccagctgcggcgacaggcgggcaaagtcagccccgatagtggtggcctcctgccaggtcgcgttgcgcgagaagtcgtggcttaacagccccttccagtaggtctcgaacgcgttatgaatcgaatgccagtgccagtaagagaccattgccgcccccgatgccacgtggctaaaagcctgcaggcgcagctggcccggataaggtgtccactgggcaaagccctgcgcctgggtttccagcacgaagtaattcttaccctgctttagcgaacgcgtaatggcgccgccaaacgcgatttctcgcccggtcaggtgtttctggctcgggtgatagatatcgacaccggcaatatccagcgtctgcgccgccgcaaaatggtcaactcgcggctgcacgccgtaggagtagccgcgccattcaaaatcgaagttgtgggtgacgaactgatgcggctgggcatattcgcgcacgatctccgcctgccaggcgagatactccgtcacctgctggcgctggtagcgggagaacgcgcaggcgaggctggcgttgatagtgttttcgaccggcggaaaatcctgccagctatcgatgcggttgctccagtagtccagaccaaaatcgttattcaaccggtcaagatcggggtatttttcccgcaggctgcgtacaaaaccctcctgcatatggcggccgatattatcgtaatgcttggtttcgttatccagctgccagccaataatcgccggatggtgctgcacgtgcgccattagcgtacggataatcttttcggcatagcggcgaaaggtcgggttgacgatatccataatctggcgcgggccatatttttgctgcccgttgacggtagtgaccaggatatccgggtgcttcgccgccagccaggccgggacggcgtaggttggcgtgccgataatcaccgcgatccccgctttatgcatggcattcagcacccggtcgatatggtagaagttatattcgccctcccggggctccagcgtactccaggtcgattcggcaatccgcaccacgttaatgcccgtttcctgcattaaggcgatatctttcgccagccgatcttccggcatatattcatcgtaataggccacgccataaaataaatcagacatacaggttacctccttaaattaatgcgcgggcgccggctgcggggcaaaagcgcgcgctttgtccagcgtaataaatgaaatcagggtaaagcacagggcgataccgccgagcacgatatagctgctggtaaagcccatgctctggtacatgtgaccgatgccggtagaaaggaaaatagagctaaagcttttcgaaaactggaagccgattaaataaaccgtggccgaaagcagcgggttgaagttggccgtaatatatttcagcgcggcgacgagtaataccgagctctcaaaaccgtgcagcagtttaatcaggctaatggacaccggaccgatagcccaggccgagccgataatgcgcagactcatgatcattccgcagtacagcagagcatttttcgggccgattttattcacgaaccatggggcgaaaaacatcacgaccgcatcaaggaaaatctgacctgtggttaaatagccgaagacttccgcgccgcgcgctttgctctcaaagaagtggctgtaatagatggcgaactgctggtcgtaggtttcatataccgcgccgacgccgatcgtgtagatcgcgaagaaccagaatttcttcattttcagcagcgaggtggcgtcgctcagggtgaccggcgaggctttactgctgtgtatcgcgccttgtttattcgcgctaatctgcattttccagacaatgaccagcaggcatacgccggcaccgctggccagccagaaaatcatgttctggtcgatcccgtagagcttgcctgccgcgaaggtgccgatagccgcgccaatgccgccaaacattctggcgcgaccaaactcaaaaccggaagcgcggctgactttatcaatgtaagcttcgcaaataccgcagcctgcgccataggccatgccaatatagatgccgcccgccagcgccccgagaaaaacgttaacttttaataatggcgcaaagacgtagatccagtagggggcaaagagggtaataatgatggccagcagccacatcaggtttttacgatagaccagcctgtcggatataaaaccgaatagtggttgaacgcaaacggcaataatcgcggtaaaggaataaaccagaccgacgtcagtgtaattaatgccgatggtttccgttaaccacaatgataaataaggatagcagcatccccagccaataaagaagaacaggaagaacagacagcttatatagtagtttttatttgattctatcatggtaaccctcgcttcctttattcaggaatatgatcgtgtagacgcgagcaaagttacctttttgcgcagaggggagtcatgaacgtttcgctgtggagcagtaaaaatctgctattgcccgaggggcgtgagcagcctcacattcgggcaataaaaaaggcggattttcatccgccttgtcggttcgtcaacggttttacgctgactctttatcgctgttggccgcatccggcagcttgggcaccagcaccgtcggcttattgtcgatacgggtcaccagcagctgatcgatgcggtagttgtcgatatccaccacttcgaacttatagccggagaatttcaccgcgtcggtgcgcttgggaattttacgcagcataaacatcataaagccgccgatggtctcgtagttgccggactgcgggaaatcatcgatatccagcacccgcatcacgtcgtcgatcggcgttccgccgtcaatgagccaggagttttcatcgcgcgcgacgatctgctcttccagcccctggccgacgaggtcacccatcagggtggtcatcacgtcgttcagggtgataatcccgaccaccagcgcatattcgttcatgatcacggcgaagtcttcaccggcggttttaaagctttccagcgcttcagacagcgtcagggtatccgggacaatcagcgtattgcgaatctgcacgccgccggtcagcaccagactctggtttgccagcacgcggttcagcaggtctttggagtcaacgtagccgatgatgtggtcgatatcttcattacagaccaggaacttggagtgcggatgctccgcgaccttattcttcaggctctgttcatcttcgtgaagatcgaaccagatgacgttttcacgcgaggtcatcgatgaaggcacggtgcgcgattccagttcgaatacgttctcaatcagctcatgctcctgcttacgcagcacccctgccagcgcgccggcttccaccacggcgtaaatatcatcggaggtaatgtcgtctttacgcaccatcggaattttgaacaggcggaagatattgttggccatgccgttaaacaaccacaccagcgggcggaagagaaacaggcagaagcgcatcgggttgatgatgcgtaaagcgacggcttcaggcgcgatcataccgatgcgtttcggagtcaggtcagcaaacagaatgaacaggctggtgaccagggtaaaggagataataaagctcagctgttcggagagctccggggacatatagcggctaaagaggccgtgaaacgccggcgaaaatgccgcatcgccgacgataccgccgagaatcgctaccgcgttgaggccgatttgcaccacggtaaagaacatcccggggttttcctgcatcttcagcacgcgttgagcgttgatgttgccgtcatcggccagcagcttgagtttgattttacgtgatgcggccagcgagatttccgatatcgaaaagaacgcactgacggctatcagacaaagtattactaaaatactgtttaacatatcttatctgaccgttgagatcagatcctcggaagggaagtggataacgctaagtggaattcacaaaaagccggtccgaaggctctggaccggcgatagcacggcgtagtatagcgtaaggtactgtaaagccgccagagcgtaaattattcaatccggcggcctgccctacggtgcagccgcatcaggcctgcggcggcaaacaaaccccaattccgccaatgccgcagtatccgtagggatttttatgcagatactgctgatgatcgtcttccgcatagtagaacggcttcgccgtcgcgatctcggttgtgatagtgcgcgggtcgttggcttcattcattgccgcctggaaacgcgccaggctggccttcgccgcctcgctctgctcaggcgttagcggataaatcgcggagcgatactgcgttccgcggtcgttaccctgctgcatgccctgcgccgggtcgtgattttcccagaatacctggagcagctgctcatagctgataacctgcggatcgtagaccacgcgcacggcttcagcatggccggtctcgccgctgcagacttcgcggtaggtcgggttgggcgtatagccgccggtatagccggcggcggtgctataaacgccgggcagctgccagaacaggcgttcaacgccccagaagcagcccatggcgaacagggcgacttccattcctgcgggaacgttggtcatcgagtgaccattgacggcgtggagcgtagccaccggcatcggcgtgttgcgtcccggcagcgcgtccgcttgggcgacaagatgcgttttatcaaatagactcacggtgggcctctcaaaacagaaaatgtggttaaggttgtaaccaagcgtgtctttgaacacaataaacgcgcttaatacgtctagatttaaacataagaattatttgggataacgtctatttttcaacccttagttgttagggttttgttaagccgtggagcggcactttcgtttccttcggggggaaacaaggatattcaggagaaaaagtgctacaaatccgccagttatgtatcgccagcgttttgctggtcagcggggtcgccagcgcagcgagcgtgcgtttgcaggttgagggactatccggggaactggaaaaaaacgtccgcgcccaactctctacgatccagagcgatgaagtcacgccggaccggcgctttcgcgcgcgcgttgatgatgctatccgcgaaggactgaaagcgctgggctactacgaacccacgattgattttgatttacgtccgccgccggcgagggggcgtcaggtgctgatcgccaaagtcacgcccggcgaaccggtgcgcattggcggcactgacgtgattttacgcggcggcgcccgaaccgatcgcgactatctggatttgctaaacacgcgcccggcgatcggcacggtcctcaatcacggtgattatgacagctttaaaagctctctgacccgggttgcgctgcgtaagggctactttgacagcgagtttaataaaagccagcttggcgtttccctcgaccggcatcaggccttctgggatatcgactacaacagcggcgagcgctaccgctttggcccggtcacttttgaaggctcgcaaattcgcgacgaatatctgcaaaacctggtgccgtttaagcagggcgactactacacctcgcaggatttagccgaacttaaccgccgcctggcggcaaccggctggtttagctccgtcgtggtggcgccgcagtttgacaagtcccgccagacgaaagtgctgcctttgcagggcgtggtctctccgcgtaaagagaacaccgtggaaaccggggttggctactcaaccgacgtcgggccgcgcgtcaaaggcacctggagaaagccgtggatgaactcctacggccacagcctcacttccagcctcagcctttccgcccctgaacagcaacttgatttcagctacaaggtaccgctgttaaaaagccccctggagcagtactacctgatgcagggcggctttaaacgtacggatctcaacgataccaaatctgactccaccaccctggccgtttcgcgctactgggagatgtcgagcggctggcagcgcgcgctgaacctgcgctggagccttgaccactttacccaggccaacgtcaccaacaccaccatgctgatctatcccggcgtgtcggtgaaccgtacccgttcgcgcggcggcctgatgccgacctggggcgattcgcagcgctattcggtggactactccaacaccatgtggggctcggatattaactttattgtgatgcaggcgcaggacgtctggatccgcaccctttatgaccgccaccgcttcgtggtgcgcggcaacctcggctggattgaggccgataacttcagcaaagtcccgccggatctgcgtttcttcgccggcggcgaccgcagcattcgcggttataaatacaaatctatctcgccaaaagatgacgacggcaaactgatgggggcctcgaagctggctaccggctcgctggagtatcagtacaacgtgagcggcaagtggtggggcgcggtgttcgtcgatagcggcgaagcggtaagcgatatccgcgaaagcaactttaaaaccggcgccggcctcggcgtgcgctggcagtctccggttgggccaatcaagctggatatcgccagaccgatcggcgacaaagaagagcacggtttacagttttacatcggtctggggcctgaattatgagtttatggaagaagataagcctcggcgtactgatttttctgctgctgctgctggggacggtaggattcctggtggggacgacgaccggcctgcatctggttatcaaagccgccgatcgctgggtcccggggctggaaatcggtaaagccaccggcggctggcgcgatctgacgctggagaacgtgcgctttgagcagccgggcgtggcggtcaccgccggccagttccatctgggcgttaagctgcgctgcctgtgggacagcagcctgtgcgtcaacgatatctccctgcgcgatatctatgtggcgatcgataccagcaagatgccgccagcggcgccggttgaagaagaagagagcgggccgctgaatctctccacgccttatcccgtcaccctgagccgggtggcgctgcataacgtcaacgtaaaaattgacgataccgccgtctcggtgcgcgacttttccacggggcttaactggcaggagaaaaacctcaccctgacgccgacctcgctgcaggggttgctcatcgcgctgccgaaggtggcgaaggtggctcaggagcaggttgtcgagccgaaaattgacaacccgcagccggaagaaaagccgctcggcgagacgatgaaagagctgttctcgaaaccggtgctgccggaaatgactgacgtccatctgccgttgaatcttaatattcaggcgttccgcggcgagcagctgcgtctcaccggcgataccgatataaccatctacaatctgctgcttaaagtcagcagcatcgatgggcagatgaagctggacgcgttggacgtggactccgaccaggggaaagtcacggcttccggtaacgcgcagctgcaggataactggccggtcgatatcaccctcaacggtacgctgaatattgaccccctgaagggcgagaaagtgcagctaaaagtgggcggcgaagtgcgtaaaaagctcacggtcggcgtcgatctgaatggtccagtcgcgatgacgctgcgcgccgaaacgcagctggctgaggccggcctgccgctggatatggaggtgaaaagcaagcagctctactggccgtttaccggcgagaaagcgtatcaggctgacgatcttctgctgaaatttaacggcaagatgaccgactacaccctggcctttagcaccgcggtgaaagggcagtcgctgccgccagcgaagattaacctgaacgcgaagggcaacgagcagcaggtaaatctcgataagctcaccgtcgccgccctcgaagggaaaaccgaactgaaggcgctgctcgactggcagcaggcgatcagctggcgcggcgaactgacgcttgacggtatcaacaccgctaaagaggtcccggactggccgtcgaagctcaacggtctgattaagacccagggcagcctgtacggcggcagctggcagatgtcggtgccggagctgaaaattaccggtaacgtgaagcaaaacaaagtcgatgtaagcggatcgctgcagggcaacagctatatgcagtggaaaatccccggcctgcatctggctttaggccctaacagcgccgacgtgaaaggcgagctgggggtcaaagaccttaacctcgacgccaccattgatgcgccgcatctggataacgccctgccgggcctgggcgggacggcgaaagggctggtgaaggttcgcggcaccgtcgacgcgccgcagctgctggcggatatcaccgcccgggcgctgcgctggcaggagctgtcggtggctcaggtgaacgtgaagggcgatgtgaaatccaccgaccagattggcggtaaccttgacgtacgcgttgaccgtattagccagccgggcgtgaatatcagcctggtgcagctcaatgcgaagggcaatgagaagcagcacgacctgcagctgcgggtgcagggcgatccggtctccgggcagctttcgctggcggggagctttgaccgcaaagcggagcgctggaaaggcacgctgagcaatacccgtttccagaccccggtggggccggtggcgctgacgcgtgatatcgcgctggattaccgcaaccttgagcagaaaatcagcatcggcccgcactgctggactaacccgaacgccgagctgtgcgtaccgcagaccatcgacgccggcgcgagcgggcgcgcggtggtgaacctcaaccgtttcgatctcgcgatgctcaagccctttatgccggaagcgacccaggccagcggcgtgtttagcggtaatgccgatgtgagctgggacaccaccaaagaggggctgccgcagggtaaggtcaccctgagcgggcgtaacgtgaaggtgacgcagacggtcaacgacgcgccgctgccggtggctttcgataccctgaacctcacggccgatctgcacaataaccgcgcccagctgggctggctgattcgcctgaccaacaatggccagctggacgggcaggtgcaggtcaccgatccccagggccgacgcaatctgggcggtaacgtcaatatcagcaacttctcgctggcgatgatcaaccctatcttctcgcgcggtgaaaaggcggaagggagactgaacgcgcgtctgacgctgggcggtaacgtccagagcccgcagcttttcggtcagatgcagctgaacggcgtggatattgacggtaactttatgccgtttgatatgcagccgagccagctggcgatgaattttaccggtacccgttcgaccctgcaggggacggtgaacactcgccagggacagattgcgctcagcggcaacgccgactggacgcagattgacaactggcgcgcgcagattgcggcgaagggcagccgggtgcggataaccgtgccgccgatggtgcgcctggatgtgtcgccggacgtggtctttaccgccacgccaagcctgtttaacctggatggcagcgttgatgtgccctgggcgcgaatcgtcgtcaacgaagtgccggaaagcgccgttggggtctcatctgacgaagtgatgctggataaaaatctgcagccgattaagcagcagagcgccggtatccctatcaacagcaatctaacgattcacgtgggcaacaacgttcgtctcgacgcctttggtctgaaagcgcgtctgaccggcgatttgaaagtggcgcaggacaaacaggggctggggctcaacgggcagatcaacatcccggaagggcgtttccatgcctacggccaggatctgatcgtgcgtaaaggcgagctgctgttctccggtccgccggatcagccgctgctgaacatcgaagccattcgtaatccggacgccaccgaggacgacgttatcgccggcgttcgcgtgaccggctcggccgatcagccgaaagcggagattttctccgatccggcgatgtcgcagcaggaagcgctctcttacctgctacgcgggcagggtttaggcagcggacagagcgatagcgcagccatgacttcaatgcttattggtatgggggttgcacaaagtggtcaggttgtgggtaaaatcggcgagacgtttggcgtaagcaatctggcgctggataccgagggagtgggcgactcctcccaggtggtggtcagcggctatgtactgccgggtctgcaggtaaaatatggggtagggatctttgactccctggcgacgttgacgttacgctatcgcctgatgcctaagctatatatggaagctgtgtctggcgtagaccaggctctcgatttgctctatcagtttgagttttagcaatgcgaatatttgtttacggcagtttacgacgcaaacaaggcaacagccactggatgaccaacgctcagtggctgggcgatcatagtgtcaatgattatcaactgtacagcctgggccactatccaggcgcggtgcccggcgatggcacggtacatggtgaggtctatcgtattgacgcatcgacgctggctgaattggatgcgctgcgtaccaaaggcggcgagtatgctcgtcacctgatccagacgccctacggtagcgcctggatgtatgtctatcagcgccccgttgagggcttcacgctgatagaaagcggcaactggttggataaagaccagtattaataacgataacgccaccttcgggtggcgttgttttttgtggcgttgggtgctgtcgccggctcgggcatggatcaacggccaaaaaaacaccgcccggaggcggtgtttttgcgaacctgagtgcggctgaattacttcttagcgcgctcgaaggaagccacgatttcagctttcgccgcttcagcgttgtcccagccgtcaaccttaacccatttgcccgcttcgaggtctttatagtgctcgaagaagtgggtgatctgcgctttcagcagttccggcaggtcgttcacatctttaatgtgatcgtactctttgctcagcttggtgtgcggtaccgcaaccagtttcgcatcttcaccggattcgtcggtcattttcagcacgccaaccggacggcagcggatgactgaacctggctccagcgggtacggcgttgggaccagaacgtcaaccgggtcgccgtccagggacagggtgtggttgatgtagccgtagttgcacggatagaacattgccgtggacatgaaacggtcaacgaacagtgcaccgctctctttgtcgacttcgtatttgataggatctgcgttcgccgggatctcgatcacgacgtagatgtcttccggcagatctttgcccgcaggtacgttgagtaagctcatgtctgtttcctttaaaatgtatggcaaacaagtgcccggtattatagccaactcacatcgaatgtcttcgcttctttttccccagaacgggtgggtggagtctgaatttttcagcgtaagacagcctgaaaatccataaacatagccgcatactgaataaaattatgtaaccgttttcattgcatatgcttgatatctcaaagtgtgcaaaatttcgtcataaacggcgaagctcgcgcggctcgcgaagcctcaccggctctccgctggtgagatggccgccgattaacatctaattaacttttttgaagtgtgatgtaacgcattcagttacatctccgattgtctatagtttgtccgcaggtgaggctttaaccaacaataaccctacgaggatcctcttatgtggaagcgcttacttcttgtcacagcagtttccgcagctatgtcgtctatggtcatggctgcccctcttaccgtaggtttttcgcaggtcggttctgaatccggctggcgtgcggccgaaactaacgtcgcgaaagaggaggccgcgaagcgcggcatcactctgaagattgccgacgcgcaacaaaaacaggaaaaccagattaaagccgtacgctcctttatcgctcagggcgtcgatgccatcttcatcgcgccggtcgtggcgaccggctgggagccggtactgaaagaagcgaaagaggccaaaatcccggtattcctgctcgaccgctcaattgatgttaaagacaaagatctctacatgaccaccgttaccgcgaacaacgtgctggaaggccagctgatcggcgagtggctggtcaaaaccgtcgacggtaagccgtgtaacgttgttgaactgcagggcaccgtaggggccagcgtggcgattgaccgcaagaaaggcttcgctgaggccatttctaaagcctctaatatcaaaattatccgctcccagtccggcgattttacccgcagcaagggcaaagaagtcatggagagctttatcaaagcggaaaacaacggcaagaacatctgcatggtttacgcccataacgacgacatggtgattggcgccattcaggcgattaaagaggccgggctgaagccgggcaaagatatcctcaccggctctatcgacggcgtgccggatatctataaagcgatgatggccggcgaggccaatgccagcgtcgaactgacgccgaatatggccggtccggcgttcgatgcgctggagaaatacaaaaaagacggcaccctgcctgaaaaagtcaccatcaccaaatcgaccctctacctgccggatacggcgaaagaagagttagagaagaagaaaaatatgggctactgagtagccgaatgacaggttcaccgccgcctccgggatgtccccggtcgctaaagcgcggctgatttccctctcctcccatcggggagagggcaaaggtgaggggggagagcatgaacggcgaattacatcaggaaatccttcgtactgaagggcttagcaaatttttccccggcgtgaaggcgctggataacgttaattttagcctgcaccggggcgaaatcatggctctgttaggcgaaaacggcgcgggtaaatccaccctgatcaaagcgctgaccggcgtctatcatgccgatcgcggggccatctggctggaagggcgggagatcgcgccgaaaaataccgctcacgcccagcagctggggatcggcaccgtctatcaggaagtgaacctgctgcctaatatgtcggtggcggataatctgtttatcggccgcgagcccagacgctttggcctgctgcggcgtaaagagatggaaaagcgcgccaccgcgctgatggcgtcctacggtttttctcttgatgtccgtgaaccgctgaaccgcttttcggtggcgatgcagcagattgtcgcgatctgccgggcgatcgacctgtcagcaaaagtgttaattcttgatgaaccgaccgccagcctggatacccaggaggtggagatgctctttaccctgatgcgccagctgcgcgatagcggggtcagcctgattttcgtcacccacttcctcgaccaggtgtatgccgtcagcgatcgcatcaccgtgctgcgtaacggcggttttgtcggctgccgggaaacccgcgagctgccgcaaattgaactggtgaagatgatgctgggccgtgagctggagcataacgccctgcagcgcgcgggccgcaccctgctgagcgataagccggtggccgccttcgaagattttggcaaaaaaggcaccatcgcaccgtttagtctgcaggtccgtcccggtgaaatcgtcggcctggcggggctgttaggctcgggacgtacggaaacggcggaggtgatcttcggcattaaacccgccgacagcggcaaagcgtggatcaaaggcaagccgcaaaccctgcgctcgccgcatcaggcatcctgcctcgggatcggcttctgtccggaagatcgtaaaaccgacggcattatcgccgccgcctcggtgcgggaaaatatcgttctggcgctacaggcgcagcgcggctggctgcggccgattggtcggcgcgaacaaaatgagattgccgaacgtttcattcgccaactgggtattcgtacccccagcgctgaacagccgattgaatttctctccggcggtaatcagcagaaggtgctgctctcccggtggctgctgacgaagccgcagttcttgatccttgatgaaccgactcgcggtattgacgttggcgcccacgccgaaatcatccgcctgattgaaaccctgtgcgccgatggtctggcgctgctggtcatttcttcagagctggaagagctggtgggttacgccgatcgggtgattatcatgcgcgatcgccagcaggtggcggagctggctctgagcgagctctccgtgccggcgatcatgaacgctattgcggcataaggagtaaccgatgatgcctcaatctgttccgaaaaccggccagccgaaacggcgctttaactggccaaaagggatgccgcaaattattgcgctgctgctggtgctggtcgttgacagcctggtcgccccgcatttctaccagatcgtgctccaggacgggcgactgttcggcagcccgatagatattttgaaccgcgccgcgccggtggcgctgctggcgattggcatgacgctggttatcgccaccggcgggattgacctctccgtcggagcggtgatggcgattgccggcgcaacggcggcgtcaatgaccgtggcggggcacagcctgacggttgtgctgctcgcatcgctgggggccggcgcgctggccggtctgtggaacggcattctggtggcggtgctgaagatccagccgttcgtcgccacgctgatcctgatggtcgccggacgcggcgtggcgcagctgatcacctccgggcagatcgtgacctttgactctccgcatctggcgtggctcggcagcggatcgctactgctgttcccgacgccggtgattatcgccatcgtgacgctggtgctgttctggctgtttacccgcaaaaccgcgctggggatgtttatcgaagcggtggggattaacattcgcgcggcaaaaaacgccggggtaaatactcgcatcgtcgtgatgttggcctacgtgctgagcggcgtttgcgcggcgattgccggcattatcgttgcggcggatattcgcggcgcggatgccaataatgccgggctatggctggagctggacgccatcctggcggtggttatcggcggcggctcgctgatgggcgggcgctttaacctgctgctctcggtcgtcggggcgctgattatccaggggatgaataccgggatcctgctgtcaggattcccgccggagcttaatcaggtagtcaaagcggtggtggtgctgtgcgtactgatcgtccagtcgccgcgctttatcagcatactgaaggggatgcgcggccatgataaaacgtaatttaccgttaatgattaccctcgcggtcttcgtactgggatacctttactgcctgacccagtttcccggctttgcctcgacgcgggtgatctgcaatatcctgaccgacaatgcctttcttgggatcatcgccgtcggcatgaccttcgtgatcctctccggcgggatcgatctgtcggtcgggtcggtgatcgcctttaccggcgtatttctcgctaaagcgatcggtttctgggggatttcgccgctggtggcgtttccgctggtgctggtgatgggctgcgcctttggcgcgtttatgggcctgcttattgatgcgctgaagatcccggcgtttatcatcaccctcgccgggatgtttttcctgcgcggcgtcagctacctggtctcggaagagtcgattcccattaatcatccggtgtatgacgcgctgtcaggactggcatggaccatccccggcggtgggcgtctgagcgcgatggggctgctgatgctgctggtggtgatcggcggaatttttatggcccaccgcacccgcttcggtaatcaggtttatgccatcggcggcaacgcgacgtcggcgaacctgatggggatttccacgcggagcacgacgatccgcatttatatgctctctaccgggctggcgacgctggcggggatcgtcttctccatctatacccaggcgggctatgcgctggcgggcgttggcgttgaactggacgcgattgcatcggtggttatcggcggtacgctgttgagcggtggggtggggacggttctcggcacgctgtttggcgtcgccattcaggggctgattcaaacctacatcaacttcgacggtacgctgagttcatggtggaccaagatcgctatcggtatcctgctgttcatctttatcgcgctgcagcgcggcctgacggtgctgtgggagaatcggcagagttcgccggtgacaagggtggggcactgacggaaggatttcccctcccgtaaggcgggaggggaagaggcgggttacgcgtccgggaactctttaataaagttttcgacgtcttcaaccatatggttgttgccgacgaagaaagaacggcgctgatgcagactttccgggatgatatccagaatacgctctttaccatcgctggccttaccgcccgcctgttccgcaaggaacgccatcgggttgcattcgtacagcaggcgcagtttaccgtccgggtggctggcggtgctcggatagagatagatgccgcctttaagcaggttgcggtggaaatccgccaccagagagccgatgtagcgtgaggtatacgggcgctgggtctctttatcttcttcctggcagtgcttaatgtacttcttcacacccatcgggaacttaatgtagttaccttcgttaatcgagtaggtgttgcctttttccgggaagcgcatgcgctcctggcacaggcagaagacgccaagggaggggtcataggtaaaggcgtggacgccgcagccggtagtgtaaaccagcatcgtcgaggagccatacaccacatagcccgcggcgacctgtcggttgcccggttgcaggaaatcttcttcggtaacgggggtgcccaccggcgtgacgcggcggtaaatagagaagatcgtgccaacagagacgttaacgtcgatgttagaagatccatccagcgggtccatcagcaccacgtatttggcgtgttcgcatccttcaaagacgacgatctcatcttcttcttcagaggcgatcccggcaacaatatcgcgtgctcgcagtgcggctttcaacttttcattggcaaacaggtcgagtttttgctgaacctcgccctgaacgttttcagcaccgctggcacccaggatatcgaccaggccggccttgttgatatcgcggtggatgatcttggcgcctaactttatcgccgacaacaaagcagtaagctcgccggttgcgtgagagaactcgtgctgcttttcgacaataaattcacctaacgttttcataacccgttccctgcatgtttatgtgaagtaaaacgaacataacaatcttaacaaagaataaaaaaagttcgcactggtgaatcgcgccagcaaaatacggattcgcctgaaatgcatttctttcccccccaacatcccggtaaactgtgcttcagataagagaaggaaatgacgaatgcgcattcatattttaggaatctgtggcacgtttatgggggggctggcgatgctggcgcgttccctcggtcatgaggtaacggggtcggatgcgaacgtctatccgccaatgagtaccctgctggaaaaccagggaattgagttaattcaaggatatgatgccagccagctggatccgcagccggacctggtgatcatcggtaacgcaatgacgcgcggaaacccgtgcgtggaagcggtgctggaaaataatatcccttacatgtccggtccgcagtggctgcacgatttcgtgctgcgcgatcgctgggtgctggcggttgccggaacgcacgggaaaaccaccactgccggcatggcgacctggatcctcgaagcctgcggctacaagccgggctttgttatcggcggcgttccgggcaacttcgatgtttccgcgcgcctcggcgacagcccgttcttcgtgattgaagccgatgaatacgactgcgctttcttcgataaacgttccaaatttgttcattactgcccgcgcacgttgattctcaataaccttgaattcgaccacgcggacatctttgacgatctaaaagctattcagaagcaatttcatcatctggtgcgtattgtgccgggcaaaggcaagattatcctgccggagaacgacatcaatttgaagcagacgatgtcgatgggctgctggagcgagcaggagctggttggcgaacaggggcactggcaggcgaaaaagctcaccaccgatgcttcctcctgggaagtgtggctggacggcgagaaagtcggcgaagtgaagtgggcgctggtcggcgagcataatatgcataacggcctgatggccatcgccgccgcccggcatgtcggcgtgctgcctgccgatgcggccaacgcgctgggcagctttatcaacgcccgccgccgtctggagctgcgcggcgaagccaacggcgtgaccgtatacgatgatttcgcccaccacccgacggcgattctggcgaccctgcaggcgctacgcggcaaagttggcggtaccgcgcgtattcttgccgtgcttgaaccccgttctaacaccatgaaaatgggcatttgcaaagacgacctggcgccgtctctcggtcgcgcggacgaggtcttcctgctgcagccgcagcatatcccgtggcaggttgctgaagtggctgacgcttgcgtacagcctgcacactggagcgccgatgtcgatgcgctggtggatatgattgttaaaaccgcccatcctggcgaccacattctggtgatgagcaacggtggatttggcggcattcatcagaagctgctcgataagctggcgaaaaaagccgaggcggccgagtaggctattctcctcgtttatccgccctccgcgtgagggcggatagtttttgtggccaggagggttcatgttgaattcagaaagagtgacctctaccgattccgcgcattttcccgcgcttgatgcgctgtacggcagggccttcccgtggcacgagcagcgtgaagccgaggctaagcagcaggcgcttgataatccgcattatgaactggaagcctggttcgatgatggccagtttattggcctgagcggctgctggcggtttgctgactatcgctacgttgaacatctggccatcgacgataccttgcgatcgcgcggctacggcaagcggctgttagctgaaatacttcagcgcgcgccgctgaccgttctggaaatcgatccgctgaccagcgaagttgcccataagcgcctgcgcttttatcaaaccatgggcttttgcgcgaatccctgggcgcatcgccatccgacctatcatcaaggcatcgccgatcatgaactgatcgtgttgagctatccgcagccgattaatgaggcgcagtaccagcgctttgcgcaggatttgcgtttggtggtcatggagcaggctggcgcggtcaaggttttgtagcccggacaaggcgcgtcaagcgccgcctccgggaagcagcgcgcaatgtcacctccgctgttctcccggctcgcgctgcgcttagccgggctacgggtttaccgtcgtctgcgggccggtagtccggacaaggcgcgtcaagcgccgcctccgggaagcagcccgcaatgccacctccgttttctcccggctcgcgctgcgcttagccgggctacgggttcagcgccgtctgcgggccggtagcccgggtcaggcgttacgccgcaacccgggatgggctcaaagcttacgctactccttcgcgataggcgtttcgtcttccgctactttggtatcgccctgaatggcagcgattttcttctccacgtcggcaacctgctcgctgctgtgcagcagcgtataggtcagatcaaactgggtgcttgccccgggctgaagctgcttaacgcgtttttgctcgcgctcgatggttaccggataggcgtagctggtacccggctcaataccggtcacgtaaccctgtttctcggtatcggtgtttttccacagcgtcagcaccggcagctggcgggtatcaaactgaatcgatgcccctttgtcgccggctttgttgaccaccgcggccagcgtttgatgattttcgtccgccagcggctgcatgttaaacaccatttcatcgaaatctttggttggaccggcgtaggtttgccaggtttttaagccggctttggcgtagtcattgaacgggctgatgctggcgatcggcgccataaagcgggccccctcttcgaggatcggcttgccaaagttgctgtgatagataatctgatagtcatgcggatagtcagcatggttggttaagacatcgtgcaggctgaagctgttgctgccgggtacatagcgcagctcggtcatggtctgcagatccgctttcttaaacgtgctctccttcaccagcccgcgaacgcgaatttcatacggcgcggtgtccgcgacttccacttccacctgtgaagccggcgtgttgccgaccttgccgtgcagggtataaatctgtccgtctgcggttaccgggtggccggtccattcatagccgcagcgcaccatcatttcattgaagccttccagccagcccagcccgttgcggctttcgaggttaataaaggccgggttgaccacctcttttaccggtgagtcccagcccatccgtgaaccaaaaccttcgattttcagcagattcatgccgcgagtcgggctcagggtaatcgtcaggccgtctttgctgtggattacgaggattttgctgccttcctgtttcccgccgtgaaggactttttgctcaatgctgaagttatgatcttttatcttcagctggtcgctggttatctgccagtttcctttatccatgccgctttcagcgcttgtcagcacccatgttttcgcgactactggcccagaaacaagcatggcaattgctgttaaagctaatgtttttttcattttttaacccttttgctgaatcgattgtgttgctgatgcaggaaatttagttgtaagtggattatgaaaatgtgaagtgtctcacctggtgagaaaacggccgtttttatatttttaaatgagatttaaatcgctttttttaagtaattataaaagttgttgctaaaaaaatgtgaatcaggatgattttagctttaacgattcagctattactggctacggctatgatgaagcctttagaaacgacagggccgccgggctttagtggcccaggcggccctggttgaagcggctttatcgtttaaaaaaaacgcagcggggaggttatcaagcgccgtagaacgctttggtatagagccctttgacatcctgaacggacggatagttaggattcgttaatgtgcagggatcgtcaacggcatggtgactcattctgtcgaggacgttcacaaaggtgatttcattgatttcaacttcgccgcactggcttagcgttttcggcacgcccagacgttgattcagcgcgttgatcgcttcaatcaggtttttgatgcctaacgccgcttccagctgacgatattttttggtgaacttcgcattatattgaatgatataaggcagcataatcgcgtttgccagaccgtgggtaataccaaactcgccgccaatcttatgcgccattgaatgaactaaccccagcgaggcgttggtgaaggcgattcccgccagcgcagaagcattgtgcatatgcatgcgggcgtttaaatcatcaggtgagcaccaggcgatttccagatacgtaaacaccagccgaatcgcttctaccgcataggggtcagtaaacgagttggccgcggtggagacataggcttcaatggcgtgggtcagaacgtccattccggtatgaacggtaacgtgcggcggcatttttgccggaatggtggggtcgagaatggcgatatccggtaccagatcggcggcaacaatcgggtatttgatatgatttgccgtgtcggtgatcaccgaaaatgcggtgatctcagaggcgctgccgctggtggaagggatcgccacaaatcgggctttattgcgtagcgccggcatggaaccgaccgggagaatatcctcgaacttcagctgcggatgctcgtagaaacaccacattacttttgcggcatcaagcgcggagccgccgccaatcgccactatccagtccggttcaaaagcctgcatcgcttttgcgccgcgccagacggttttaatggacggattgggttcgacattatcgataataatgcactccatacccgctttattaagttcgctgacggctttatccagaaagccaaaacgcttcatggaacttccgccagtgactaacgcggcttttttgccgctcagcgtggaaagatgttctaaagcattttcgccataaataatactgcgaggaattgagaaggcctgggtcataggaaactccatttaatattaaggatttttttagtgtgcattcgtcatttacgattcagcgacacgtgcagagtaaaaaaatcgaattaatgctccagatattgccgaagcaatatctggagggagttgaccgtcatacttcgagcggctggtgcgttgactgcaacttgaattatttggggtattagcggcgtttaaatcgtaccgtcccaggagtcgactttttcgcgtttcgcttcctcttcatcaaaccagcgcgaggtcacgcattttgattcggtgtagaaacggacgccgtctttgcccaggcagtgcaggtcgccgaagaaggactgcttatggcctgagaacgggaatacgccgaccggcaccggaataccgacgttgataccgaccatgccgccgtgggtgcgtttctggaattcgcgggcgtagtagccgctttgggtgaaaataaccgagccgttggcaaacgggttattgttcataagttgcagaccttcctcgaaggttttgacccgcttaaagcacagcaccggcccgaaaatttcctgcgtgccgacgctcatctcttcggttacgcgatccaggatggttggcccgacgtagaagccattttcctggcccggcacctgaatagcgcgaccatcgagcaccagctttgccccctcctcaatgcctttattaatccagttgatgaccgattgcttatgatctttagaaatcaccggacccatatcggtatcgcgcagatagccggggccgattttcagctgtttggctttctcgacgacggcggcaatcagcttatcagcgatctcttcctgcaccacgacaaccggcagcgccatgcagcgttcgcccgcgcagccaaacgcggcgttgataatccccgctgcggtacggttaattggcgcatcggccagcaccagggcatggtttttcgcttcgcacagcgcctgaacgcgcttgccgtgagcggcggctttggagtaaacgtgcagacccacggaggttgagccgacgaaggagacgccgttgacgtccgggtgggtcagcaagatatcggcttcattgcgtgagcaggtcacgacgttaatcaccccatccggcacccctgcttcctgatagagtttggtgatttccatacaggtcatcggcgtcatactggccgctttaatcaccatggtattaccggaggcgacgcataatggcgccatccatcccatcgggatcattgccgggaagttaaacggcacaataccggcgaacacgccaattggctcacgataaaggttggtgtcgatcccggcagaggcgtccatcaggttttcaccggccatgagagtgggaatcgagcaggcaagctcggtaccttctttcgcttttaatacatcgccctgggcgtcgccccaggctttaccgttttcttttgccaccagctcggttaagcggtcctgatgctggattaataattcgcgaacgcggaacataatttgcgagcgtttaatggccggcgtatctgaccacgccggaaaggctttgcgcgccgcggcaacggcatccagcacttcttgctcggtgcagcagggggcctgagccatgacttccccggtacttgggttatagacgtccatatagcgttcggtctgcgatacgcgccattgaccatcaacgaaatatttcagccttggtacagtagtcatatttttctccatgatgatagctgtcgactctctaaaatctggctccggtcggcggcaaataaccgaccgccgggttagcccctctcgtgaaaagtgaattccagcttcttgccggacgatggcctccgctgggcgattcacctgcggcggtgcggatgattttgtcgactttctgctgaggaaagcctgcagacgccaggttttaatgaacagaactcactggccaaaaatacgcgcacgcaccgtttcggttctcgtactttaatgaaatttatttttcattattatgatgtatgaaatatcaaaaccgttttgagaggtggatcaaagataagcaaactgctgataaagtcagcgccataaagcaggattatatagttttatataataaagttaacaggttgtgttgatggcattggcgttgatggcgaggggaaattgccagccggattgcaatggaacggcttttttgtgaaataaaagttaaatataagcgcgaactggaatgaaaatgaaaaattaaaaccgatttaaatgcaggggaaattcgaattgaccattgtccatggcattgcgttcgagggagtgggtcgcccggatcgggcaatagccgtaatccgggggagtcatacagaattagccttcgctttcggccagttcgcgcaggtactggaagataagacgcgcggacttcggcggcttgttgccttctttctcttttttggcgttgcggatcagcgaacgcagctgctgacgatcggcatctggccacaggttcagcacttcagccacggcatcatcaccattatcaatcagacgatcgcggatctgctcaagcttatggaacagcgcaacctgctggttgtggcggttcttcagcttgtccagcgcctgacgaatcggctcgacgtcgcggctgcgcagcattttaccaatcagctgcatctggcggcggcggccttctttcttgatacgctgggcgagttcaatcgcgtcgcgcaggtcggtatccagcgggattttatcgagcgcgtttttacccagctcgaccatttccgcgccaagacgcttcagttcttcggcgtcacgcttaatttcacttttactgacccagataatttcatcgtcttcatcttcgacgtcatcaccagggacgtcgtcgagccagtcttcgggctgctttgtcatctcaggctccttaaaaaagagactaatgttaccagttaaggcgcgcactgaaaaacggttctctgttagacttcagttaactccttcttacattatggcattagcgatgaaagtcatctctcaagttgcacaacagcgtaagacgctggaagaggccgtgaccacggcgctggaactggcggcaggcaaatccgacggcgcggaagtctccgtcagtaaaactaccggtatcggcgtgagcacccgctacggcgaagtggagaacgtagaattcaacagcgatggtgctctcggcatcaccgtttatcaccagaatcgcaaaggcagcgcgtcttcgaccgatctcagcccgcaggctattgcccgcacggtgcaggcggcgctggatatcgcccgctatacctcgccggacccgtgcgcgggcgtggcggataaagaactgctggcttttgaagccccggatcttgacctgttccatccggcggaagtttccccggatgaagccatcgagctggcctcccgcgctgaacaggcggcgctaaaagccgataaacgcatcagcaataccgaaggcggcagctttaacagccactacggcattaaagtgttcggcaacagccacggcatgctgcagagctactgctctacccgccactcgctctccagctgcgtgattgccgaagagaatggcgatatggagcgcgattacgcttataccatcggacgggcgatagacgacctgcaatcgccggagtgggttggcgaagagtgcgcccgccgcaccctgtcgcgcctggccccgcgtaagctatcgacgatgaaagcgccggtgattttcgccaacgaagtcgctaccggtctgtttggccatctggtcggggcgatcgccggcggttcggtttaccgtaaatccaccttcctgcttgatgcgctgggtagccagatcctgccggactggctgaccattgaagagcatcctcacctgctgaaaggtctggcttcgacgccgtttgatagcgaaggcgtccgtacggaacgccgggatatcattaaagacggcgtactgacccagtggctgctgaccaactactcggcgcgtaagctggggctgaagagcaccggccacgcgggcggtattcacaactggcggatcaacggccgcggcctgagttttgcaaagttgcttaaagagatggggaccggtcttgtcgtcacggaactgatggggcagggtgtaagcggcgtcaccggcgactactcacgcggcgcgtccggcttctgggtagaaaacggcgaaattcagtatccggtcagtgagataaccattgcaggaaatctgaaagatatgtggcgtaatatcgtgaccatcggcgacgatatcgaaacgcgcagcaacattcagtgcggttccgtactgctgccggagatgaagatcgccgggcaataacacttgtgtgcttaataataaaaaaggaagtgagcaatgcgtaaaaaactgttagcgatgctggccgtatcggcttttgcgcttggttcggcatcggctttcgccgatctgggcgaagatatggatacccttgctgagaacctgcaagtggtgcagaaaacttcagatgccggcgagctgaaagcggcgctgaataagatgcgcacagcggcggttgacgcccagaaagagacgccgccgaagctggaaggtaaagcggcggacagcgcggaaatgaaagactatcgtcacggtttcgatgtgctgatcggccagattgacggcgcgctgaagctggctgatgaaggcaaagtcaaagaagcccaggccgcagcggaagagtttaaaaccacccgcaatacataccataagaagtaccgttaatttctctttgtggggaggcgtcagccgatgcctcccacattctgttaattcaaaactccatcaccgtcacatttttcgcttttcctgcatgccggttttcgccaccgtgacaccgatgatcttgtgatgttcatcacgagaattggttggggcgaatacatccacaataactatgtgaaatagatcacgcctgccttcttcctttccacttcgaagtggaaaacaactcgctacaaactctttgcccccggcattagtgttatccccagagacatcaacggggtaattcaagtgaataacggagcggtaacacacgtcccagaggagcaggccacgctaaccgaacagctggccgacaagatgctgcagcaggttttcgcactattaagccgccgcaacatcgtccccaacgacgttcaggagcaaatgctgacttcccacgttcgggcgatggcccatcggtcaatcagcggcgagccgctgccggaagtggatgccagcctgttcgaagagatctcagaagattcaatgatgctggcccgcgaagtggtcgcgcagttcggcaatctgccagatgaagaagcctggctgctgtccgtccacttcgaagtcgcgaaagataacctgtaaggagcacacaaatggaacaaatcaccgttgttattggcgatcgcctgggtaaaggacaaaaagttgccgcaggtgcggaaaaagccggcgctcgcgccgtggtcgtgccgggcgttgccgcggatatgaagctgggcgacatgatgaaggcggaaaacgccaccttcggtatctctttctgcggcagcggcggcgcaggggctatcaccgcgcagaataagcacggctacaaggcgaaatatggcatgcgttccgttgatgaaggcgtcaccgcgatcaacgaaggctacaacgtactgggcttcggctttatggataaagaagagctgggtgaacgcctggttgaggcctggaagaagaagtacggcgcgtgagcatgaaagagcaattcaccaccacggtgagcgtaaccggcaaaggcgagagcaaaacgcgcgcttttgccgatgccctgaaccatgtccaggcggcggtgatgaaaacgtcgccgcacatcttactgcgtattgaaccacaggacgtggaggttgttcatgcgcgtgaagcggtacggaaagaggcctttttattcttctttttgcgccgtgagcgacgaacctacagcgtggagctgaaggtcaccgtcaccgtgaccgccattaatctcgataaagtggatttcgtcacgcaaacctgattttcaccaaagggtcagactatgttcctgataattttaataaaatcgcttatcatcggcggcctggttggcgtcggcgtaggcgccggagcggcacgcatgtttcatgcgcccaccacgcaggggatgggggcgtttcgtaccttgggcgagctgaattcatgtgaaggcgatccggcttcccacttctcatttggcctgggcttcttcttcaacgcctgggcctcttccgtcgcggcaggctccttcactcaggacgttgaccaccgcattatccccaactggggggcggcagcgctgatgattaaaaaccgcaacgtcggcgagacgctgcacgatccgaaaaagatggccatcgcctgcggcattatcggcatgatcgtggtcgctttcctcaacctcaccgcctcttctgtaccggaagcgctgcaggtgacggcggtaaaagtgctggttccggcggcaaacctgctggtgaatacggtgatgccggtcatcttctggctggcggcgattgatgccggtaaaaaatcgggcttctgggcgacgattttcggcggcgcggcgcagctgattatgggtaacgccgttccgggcctggtgctgggcatcctgatcgggaaaggcgttgaagagagcggctggcaccgcgtcaccaaggtgatgatggtggcgatcgtcgcgttgttcgttctgagcggcttcttccgcggtttcgatatgaagatgattgaatccttccatctgaccgtgccgaactggctggaactgatccacaactcgctcagcggtaaataacaggagcctctcatggaacaaaataaaggtttttggtatgccgactggtcgttcccgatctttgttggcctgctctccgccggcgtctttgccgggacgcatatgtactacctctacggcatcggcgcgtttaacgaagtcgccttcgtggcgatgctgaaagcgggaattgataccggggcctacggcgcggtagcggcgttcggcgccagcttcctgttcgcgcgtattatcgaaggctcgctggtggggattctggatatcggcggggcgattcagaccggcgtcggcttaggcgttccggcgctgctgctcggcgcgggctttgttttcccggtcgccaactttgccgcctcgctggtcaccggcctggtgctgggcctcgcgattggctacatcattatcctggcgcgtaaattcaccatcaaccagagcgattccacctacggtgcggacgtcatgatgggggccggtaacgcctcaggccgtttcctcggaccgttgattatcctcagcgccatgaccgcttccattcctatcggcatcggttccctggcgggcgcgctgctgttctacatctggcagaagcctatcaccggcggcgcgatccttggcgccatgcttcttgggtcaatcttcccggtggcgattagttaagtcctgcgggcgcctcggcgcccgcgttaacaggagagagacatgtttgatttactcctgcgccgtgcgcgcctcgtcgacgataccctgaccgatatcgccatccgggacggtaaaatcgcggcgcttggcgagattagcgcgcctgcgcgcaaaacccttgagctggacggtcgttattacgtcagtgcaggctggattgactctcacgttcactgctatccgaactcgccgatttaccatgatgagccggacagcgtgggggttgctaccggcgtgaccaccgtgattgacgcgggcagcaccggcgcggacgacgtggatgatttctaccagctgacccgcaaagccgcgaccgaagtttacgccctgcttaacatctcccgcgtcgggctgattgcccagaatgaactggccaatatggcgaatatcgacgcggaggaggtgaagcaggcggtcaaccgctacccgaactttatcgtcggcctgaaggcgcggatgagcagcagcgtggtgggggaaaacggcattacgccgctggcgcgcgcaaaggcgattcagcaggaaaacggcggcctgccgctgatggtgcatatcggcaacaatccgcccgaccttgatgagatcgccgacctgctgacctccggcgacatcattacccactgctacaacggtaaacccaatcgtatcctgacgccgtccggcgagctgaaaagctcgatttcccgcgcgctacagcgcggcgtgcgccttgatatcggccacggcaccgccagcttcagcttcgaggtggcgcggcgggcgattgctatgggcattctgccgcacaccatcagctccgatatttactgccgcaaccgtatcgacggcccggtgcgctcgctggcgctggtgatgtcgaaattcctcgccattggcatgtcgctgccgcaggtcattgactgcgtgaccgccaacgccgctgaaggcctgcgtcttagccacaaagggcggctggaagtgggttacgacgccgacctgacgctgtttactctcgcgcagacgccaacggtgctggtggatgcggaaaaagagagccttcagaccgacaagactctgctgccgcttgccgccgttcgcgcgggcaagggctatctgaccgaacaagggagcgcggaaaatgccttcgatttttgagaaatatgatttaaaacaggtgattaatacctccggtcgtatgaccattctcggcgtctccacgccgcggccggaagtggtggacgccgcgatggcggggatgaaccagtacttcgagatgaaagatctggtcaataaaaccggcgcgtatattgcgaagctgctggacgtggaaggggcgaccgtcgtctcctgcgcctcggcgggcatcgcccagtcggtggcggcggtgctggtaaaagacagcgactggctgctggaaaacctgcacgtgacgccgattgaaaacaacgaaatcgtgctgcctaagggtcataacgtcaattttggcgcgccggtgggcaccatggtggcgctgggcggcggtaggctggtggaagcgggctacgccaatgaatgttccgccgggcagctggcggcggccattaccccgcgcaccgcggccattctgtatatcaaatcccaccactgcgtgcagaaaagcatgctcaacgtggcgcaggcggcagcggtggcgcagagccataatctgccgctgattgtcgacgcggcggcggaggaagacctccaggcctactatcgcgccggcgcggatctggtgatttatagcggcgcgaaggcgatcgaagggccgaccagcgggctggtgattggcaaaacccaatacgttgagtgggttaaacgtcagtcgaacggcattggccgggcgatgaaggtgggcaaagaggggatcctcggcctgacctgcgccattgagcactatctgacggcgcgcaaagagagcggtgaagagatggtggcgaagatgacgccgtttattcagcagctcaatacgctcgatggcgtcaccgcgcgggtggtctgggacagcgccggccgcgatatcgcgcgggcggagatcaagtttgatgaagcggtgaccggcgtcgataccggcgatctggtcaatgcgctgaagcagggcgaatacgccatctacttccgtggctataaagcaaatgaaggcattattgaagccgatgtccgcagcgtgaacgcgcagcagctggagattgtctcccgtcgcatcgcagaagttttgaacaaggagaaaaacgcatgaaactgacccctaatttttatcgtgaccgcgtctgcctgaacgtgctggcggggagcaaagagaacgccagcgagatttatgaggcggcggaaggtcatgtactggtgggcgtgctctccaaaaattacccggacgtcgccagcgcggttgccgatatgcgtgaatacgcgcagcggattgataacgcgctctccgtgggactgggcgcgggcgacccgaaccagtcggcgatggtcagcgaaatttcgcgtcaggtgcagccgcagcacgtcaaccaggtatttaccggcgtggcgaccagccgcgcgctgctggggcagaacgaaaccgtggttaacggcctggtgtcgccaaccggtacgccgggaatggtgaagatctccaccggtccgctcagcagcggcgcgccggacggcatcgtaccgctggaaacggcgattgcgctgctgaaagatatgggcggcagttcgattaaatatttcccgatgggcgggctgaagcatcgcgacgagtttattgcggtggccgaggcctgcgcccgtcatgatttctggctggagcccaccggcgggatcgatctggaaaactacggcgagatcctgcagatcgcgctggacgcaggggtaagtaaaattatcccgcatatctacagttcgattattgataaagccagcggtcacacccgcccggcggacgtgcgtcagctgctttcgatcaccaaacagttagtaaaatagcgccgattatccctcacccggccctctccccaacggggagagggttagggcgaagggaaaccgccaccgaaccatcaaggagtcaccatgccaaccgctcgtcacctgcttgttgcttcactctctctgctcgccgccggcgccgctgcgcaaacccagtacgcctgggtcggcacctacaaccccaatggcgaagggctgtatcgctttaccgtcgatagccagaccggggcgctgcgcgataaaacgctggtcgggacgctgcctgacctggcccagcttaccgtctcggcggatggcaaaaccctgtacggcgccagcgaagtggaaaagggagtggtgcaggcgtggcgcatcggcagcaacggtgaactgagcgagctgaatcaggtcgcttccggcggcgccgggccggtttatctctccctgacccccgatggacgtcatctgctggtggcaaactacgtcagcggcagtatcgccgtgctgccggtgaaagaagatggtaacctgggcgaggcggtggatgtgcgtcaggatcaagggcctgcgggcgcggaacgcccggcggcagccgtcgaaggcagttttgccattagcgatcataacggcccccacgcccatatgatcgccgccgatcccagcggtaaattcgtttactccaccgatctcggcctggaccggatctatcagtaccggctggatagcgccacagggaagctgacgccgaacgatccgccgtttatcgcggcctcatctcccggctccggaccgcgccactttgtgtttacgccgcagggtgacggactatggttgattaacgaagaggcgtcgacgctcactttttatcatctcgataagcaaagcggcctgctgcgcgaggggaaaacggtctcggcgctgcctgcagagtataagggcaccagctttgccgccggcctggtcctgagccgcgatggcaaacagctgtacgtcgccaaccgactgcataacagtatcgcccactttacggtgctggctgacggcagcctgagccaccaggacgatatctggacccgcggcgactatccgcgcacgctgacgctggacagtcagggacagtggctgtacgtcatgaaccagcgtagcgacaacatcacccgctttcgcgtcgcgtcgaaggatggcaggctgacgttctctccggactacaccccggttggcagcccgtcgcagatggtgatatccgctcaaccctgagccgtaagaaaaaggaactgacatgcgatttccccatcaacgtttagcgcagctgtttactctgttgcaaaacgaaacgctgccgcaggaggagctggcgcagcggctgtcggtttctactcgcacggtacgcgcggacatcaccgcgctgaacgcgctgctgctgcactacggcgcgcagtttaacctcagccgcggcagcggctatcagctggtgattcacgatccgacgcgctatcagacgctggaagagagcgcgccgaaagcgcagcatatcccgcgaaccgcggcggatcgcatccactttttgctggtgcgctttttaacttccgcgttttctatcaagctggaggatctggccgatgcgtggttcgtcagccgcgccaccttacagggcgatatggttgacgtacgcgagcgttttcagcgttatcagctcaccctcgagacccggccgcgccacggcatgaagctgttcggcagcgaggtctccattcgcgcctgcctgaccgatctgctgtgggagctgagccagcaggggccgcttaacccgcttattggcgaagaggcgtttgacgccagcgtaccgacgctgctggccggcgtgctgcaggagacgttaacccgccatcacgtgcggctgacggacgcgggggagcgctttatctgcctgtacggtgcggttgccgtgcgccgcgtgagcgaagggtatccgctggccgattttagcgccgaggatgtggcgcaaaacgtacgcgacgccgcacgcgagctggcaaacacgatgcagcagctggcgggcaaactgcttgctccggcggaagaggagtggctgtgcgtccaccttgccgcccgccaggtgcaggacgtcgatccgggcaccatcagcgccgacgacgatgaagcgctggtgaactacatcctgcgctatatcaatcagcaatataactacaatctgctggacgatgcccagctgcatgcggatttactgacccatattaagaccatgatcacccgcgtgcgctaccagataatgatccccaacccgcttctggaaaatatcaaacagcactaccccatggcgtgggacatgaccctggcggcggtatcgagctgggggaaatatactccctacgccatcagcgaaaacgagatcggctttctggtgctgcatatcggcgtcgggctggagcgccattacaatatcggctatcagcgtcagccgcaggtgctgctggtctgcgataccagcaacgcgatggtgcggatgattgaagccatcctgcagcgtaagtatccgcagctggaaattgccgccaccctttcgcaacgcgaatatgaacagcgggaagagatcgcggaagattttgttatttccaccgtgcgcatcagcgagaaagagaagccggtggtcaccattgcgccgtttcctaccgactaccagctcgaccaaatcggcaagctggtgctggtggaccgcacgcgtccctggatgctgaataaatattttgatgaggcccacttccaggtgatagataccccgatggatcagcaggcgctgtttgccacgctgtgccagcagctgcagcaggaggggtttgtcggagcggagtttcatgggtcggtggtggagcgtgaggctatcgtcagcaccatgctcggtgacgggatcgcgctgcctcacgccctcggcctgctggcgaaaaagaccgtggtctatacggttatcgccccgcacggtatcgcctggggcgatgaaaccgcgcatatcatcttcctgctcgccatcagtaaaagcgagtatgaagaggcgatggccatctacgatattttcgtcacattcctgcgcgaacgggcaatggcccgccttgccgccacccgcagttttgctgagtttaaaacggtggccatggagtgcgtcagccggttttgatttttaccgtacggcccttcgccacgttttatgcatctgtcaccgttcacaaaatcatgccacgaccgtcgtcacctgtcccggaaaactaatttgaattaccccgccccatatgcagattaacttcgactgggcggtgagggcgggcatatttcccaccagcaccgttggcgaacccggcgcccacggcgcgggcgttgtcggaatacagggcatcggcgtcagcacaccgagcgccgcggcggtggcggcggcaaccgtcggattggcaatactgctgcacatcccgtacggcataatattcacaaacggtttgttatccataatattcgccatcggcatgttgctgacgagggtgcggcttgtgggcagtatgttcagcgtgccaggcgcgatgccaaatgaacactgcaataatgcgccggtacaaactccgggacagctcatggtaatacccccagttgccgccatagtcggcggacgatgactcgcggaataaactgatgcgcctttataaccttaagtgcccgtttattagtttgaacagatactacataaccaaagtaataaataaagcagatgcgttttttgattcacatcactatttataatttaacctgttaaagcgttaatatcagcgagaggttttcatcgatgtatattttgattggttgctttacatctaattgattttgattaattacttgtttttaatttgatttttatcaattttcactcggtgattggcagcgaataatttgattgatatttatttgtggttgtgtcttttatattgcttatggtcgccgtaaaaataccatttggatagtatggcgatataagtagcgctacgaatattctcgtaataagaaaggatgaatataggcgaagacgcttagcattaaagttattgtattagttcaatgtgcgtaaaaataacgggaatgtgaaaaaaaacggtgcgattcggctgatggcggaattgccgctaccggttgccgtctgattgataaggagtaacccatggatgtgatttttttaaagctcgacaatatcgaaggtgaaagtcaggccaaaggatttgaaaaacagcttgagatcatgaccttcagccataacgtggcgatgccggtcaccaacgacgtcagtaataatgaacgcacctcagggcgggcgcatgtcggtgaaatgtcgttgaccaagtttgtcgatctcgcgacgccaaagctcaatgagtactgctgtagcgggaaaatgattaaagaagctgtgctgacgttgtgccgtaatgataacggtaaaatgctgccattcatcatatataccctgacgaatgtcgttatctcacatctgagcgttagcggcggttccggcggcaagccggtcgaaacaatgtcgctgaactttaccaaaattaaatgggaaatcagcgctcagaaatcggatagtcagaaagaaggcaacgtctcttccgtttgggatatggcgacgaataaaaaaggtagctgagggtggaagcttcgcaccgcctgcctttccggtaaattataccgctataaaatcaagctacgtagcgccgggtatcaggtcgaggatgagtaggttatcgttcctgcgatcgccataggtcggtgcgatggtgatgatgtttatcatcaggctgaccggcgttagcgctgctgctgaaaaggagtttcctatgcccgaaaccaccataataaaactcatcgctccaaccttaaacggcctcaccgccgcgaccgcgcgcaccgaatcgcaacttaacggcctgaccaccgcgaccatcgccgctaccgcctctgcgccgttaacccttaataccacgctggcggcccatcttaccgccgccataaacagcgctgactacgacgggctgatcgccgaagcgcgcctgcttccggcaaacggcaacgctgtccgctatcagtttgtgctgcgcccgtggctgtggtggctgacgctcggcaacaacaaccgcgttttccagaacctcagcgcgcaggaaatcgtcgcgaaagtgtttaaggatgccggatttagcgactacacattccagctcaaaacccaaccccaaaaacgcgaatactgcctgcaatataacgaaagcgacttcaattttgtctcacggctgctggagcaggaggggatcttctggttcttcacccataaagaaggcaagcacacgctggtgctggcggatgataatagcgccttcccggccatttctggcggcaaaaaggtgaagtatcaggcaacatcaagcggcgcccgggaaaccgggatgattcgccaggtagagctgcgtttacaggccatcgcgcagggggcgcaccccggcaatgctcaatctgagcagccgaaacagcttatcgccgaaagcgactgcgcagcgctgatggcagggcactggtttaccctcgccgaacatgacgacaaagcattaaatatcgactggctcatcaccgccgtcagccatgaatatgacggtgaacgctatcgcaaccgctttaccgctatcccaaaagccacgccgtatcaaccacggtacgccacgccaaagccgtttatgcctacgcaaaccgcaacggtggttggcaaaaacggagaagaaaactggaccgacaagctcggacgggtaaaggtgcagtttccgtgggatcgggaaggcaaaaacgatgagaccagctcctgctggctgcgggttgctaccgcctggagcggcaacggttttggcgcgcagtttatcccgcgtatcggccaggaagtggtggtgagctttatcgacggcgacccggataagccgctcattaccggctgtgtgtacaacggcgcgaatgctctgccgtatgcgctaccggcgaatcaaacccagtccggtattaaaacccgcagcgaaaaaggcttcaacgaactgcgcttcgacgacaaaaaagatgccgagctgctggcgatgcaggcgcaaaaggacttccagctcaacatactgaacgacagtcacaccacgattagccacgatgaaattcacagcgtcaaaaacgatcgcacccgcaccatcgaagagggcaacgaaaccgtcaccctgaaaaagggcagtcgcacggtgaaaatcgacaagggcagcgacatgctggaggtgaaagagaaacgcagcgtaacggtgaagggcgatcaggaacacgccatcgacggtaatgagacgcataaggtaaaaggcaactacacgctcaatgttgacggtaatctgacgattaaggtcagcggcacgctcaccctggagagcggcaaaaccctggacataaagagtggggcgggtcttaacgccagcgcgtcaggcagcatgaagctggatgccgccagcatcgccagtgaagccaaatcctcactgacccagaaagcggcaaccatcagccaggaagctaaggctactctgaccagcaaagccagtgccacccagaccgttgacggcggcgggatgctggtgattaaaggtggtctggtgaaaattaactgatgaacgccatgctggtattaacgcaaatgatgtacaacctggttgctgctgccgcgccagattagcgccgggtcttttaagtcctgcacaaatttgccatcaaccagcacgttgatgagatccaccacctgcatctgcgcggcgttaagttcgtccagcttgtagccggtccacacccagatatctttgccggggcactcggcgcgaacgcgctgcaccagcttaaggatctccgggacgttctgcgggtgcagcgggtcgccgccggaaagcgtgatcccctggcgcttaacgcgggtatcgttgaggtcagcaataatgcggtcggccatctcggcggtgaacggcatgccggagtttagccgccaggtgctcttgttatagcagccggggcactcgtgaacgcagccggaaacgaacagggtgcagcgagtgcccggaccgttaacgatatctaccgggtaatattgatggtaattcatttttcgcttctcaattaacgccatagccgcgttggctgcgctcgctcaccccagtcacgtacttaatgtacgctcccggggattccctcgtttgccgccttgctctgacgcgaattgctttgcgaaaacggaggagctttgcatttgtaaagggaacggctcccggcgtcgctgcgctcggccgggctacgaagagccgcatacgcggttgtagcccggataaggcgctttgcgccgcgatccgggaacagctcctgagtggccggccggtcccctctcccggcaggggagaggattaggggaggggctaaaccacccggaattaaccgatctgcccgttgcccagatgcttcacgcggcgcttcacttcttcctgcttgccggcgttgaacggacgggcgtccgggctcccgagatagccacacacgcggcgggttaccgacacgcgggaggcatcgtggttgccgcatttcgggcaggtgaagcctttgctggtgcattcgaactcaccggtaaagccgcactcgtagcattcgtcgatcggcgtattggttccgtaatagggcacgtgctgatagctgtaatcccacacgtcttccagcgctctcaggttgtgctgaatattcgggtactcgccgtagcaaataaagcccccgttagccagcggcggataaggcgcttcaaaatcgattttatcgtacgggtttaccttcttctctacgtcaaggtggaagctgttggtgtaataccctttatcggttacgccttcgatcacgccgaactcagcggtatccagacggcagaagcggtcgcagaggttttcgctcggcgtgctgtacaggctaaagccgtagcccgtctcgtctttccactggtctaccgcttcgcgcaggcgctgaacgatggcgacgcctttctcacgcagcgctgcgctatcgtacatatgcttgttgccgaacagcgcgttgatggtttcatgaatgccgatatagcccagcgaaatcgacgcgcggccgtttttgaaaatctcagagacatcgtcgtccgctttcagacgcacgccgcaggcgccttccatatacagaatcggcgccacgcgagccttcaccccttccaggcgggcgatgcgggtcatcagcgctttacgcgccagctgcaggcgttcgtcgagaagtttccagaactcagtctcgtcgccacgggcttccagcgcgatgcgcggcaggttgaggctgataacgccgaggttgttgcggccatcgtgcacctgttcgccgtcctcgttttcccacacgccgaggaagctgcggcagcccatcggggttttgaacgagccggtcaccttcacgacctgatcgtagttaagaatatccggatacatgcgcttgctcgcgcactccagcgccagctgtttaatgtcgtagttcgcatcgccgaacttgtggttcaggccgtcgcgaatggcgaagaccagcttcgggaataccgccgttttacggtttttaccgagtcccgcaatgcggttgcgcagaatggacagctgaatcagacgcgattcccagctggtgccgaggccgaaaccgaaggtcacgaacggcgtttggccgttggcggtatgcagggtgttcacttcatattccagcgactggaaggcgtcgtagcactctttctcggtgcgggaacgggcgtagccttcggcgtcggggatgtgccactcttcggcaattttacggtgcttattgaagctttcggtaacaaacggcgccagtacttcatcgatgcggttgatggtcgtaccgccataaatatggctggcgacctgagcgataatctgcgccgtcaccgcggtagcggtagagatcgacttcggcggctcaatctcggcgttgcccattttaaatccctgggtcagcatgcctttaagatcgatcagcatgcagttgaacatcgggaagaacggggagtagtcgagatcgtgatagtggatcacgccgcgctcgtgggccatgaccacgtcatgcggcagcaggtgttggcgcgcgtagtgcttggcgacgatgcccgccagcagatcgcgctgggtagggatgactttactgtctttgttggcgttctcgttgagtaacgccgagttggtctgctcaaccaggccgcgaatttcctggttcagacgaccgcgcttttcacgttgactatcgcggtcgtggcgatattcaatgtaggcgcgcgccagctgcttgtagggaccggacatcagctggttctcaacggcggtctggatctcgctgatatccacctgagcgcggccctgcatttgctggctaacgacttctgcgacggtggcgcaatagtctgcgtcatcgactcccgctgctttagctgcacgtagaattgcttcattaatgcgctctgacttgaacggcactttacagccatcgcgtttcatcacatgcggtgtcatgatcactccataattttttacagaacaggttatccacagaggcggaaggtcaaccgaagccccggggcgctgtagctgccgccgtttccctccgatcctggccctttttatccacatcccatcaccgcctgagtacgatgggagtggtgatataatagactattaatacaatatgtggggccggaatgcattttaagttctatatgtagtgctttgcatcaaagatgtttgcaattttattgatgcagaacaaagtaaaaagaggagagcaggaatgatgggcgcttgcgcttaatgtaaatttatccgcttataaaataagcaaaaatgggcccttaacgcaggaaattcaggcccaaaaggaataacgtcaggcgagcagcgcgtcgttaagcaggtcaaccagcagcagcagggcgtaacgcgcggcctgagcattctcaggcaggggcagcagcgcggaggccatattgctcaacgcgtggttggcgggggtgagggcgaaaattgtcgcttcctgtacccgggccagcagggtcgcgccctgcaaaatcgcgtcggcctcgccggttgccagcaccagcaggagatgatcgtcgctgagggtactggcgatcatccgcatcagggcgctgtcctggcagagattcatcacgatcccgatggagagtagctggtgctgaagcagcgtcgccagcgcgatgtcctgtgcgccgagggcgaaacagtgtacggcgcgggcattttgcaggcgcgtgcgcagcttttgcagcgttgattcgggcgtgctcaccagctgctgctcaagatgtgtgctaatcaggcttaatttgtcgcgccacgcggcgggcagcgcggcgctctcctcgttaagccagctggtacgacgttcgcaagcctgcgccagctgctttcgcaaatcacgaatatcctcgcagccgacggagcgggcaaagcgggtaattgtggctgcgctcacgccagcgcgcaccgccagttcatcaatcgaagcgctggcggtaaaacttaaattctgcagaataaatgccgcgactcttgattcctgagcgctaaagcgagtcatgccttcctgtaactgtcctacgatatccatgctttcagcctctttctccgccaccgcctgattgaaaatatttttcaattaatgagggctttttataccacgcaaccacgcacaatgcctgagattattgccaatttctcttttatgccggagtaaagaggtgaaaaataacgctccgatcacgtacgtgaaaaaaattttcatatagccttcacccataccggcacctcgtcttatagtcgatggtgtctgtttagcgctcgcttacgccaaatccattgggaggaattatgccacgtatcgtcctgtgctgcgccgccggaatgtccaccagcatgctggttaacaaaatgaaggccgaggcgcagcagcgcgcgctggggctggagatttacgccgtacccgtcgccgagtttgagcgcgagttgcccaatgccgacgtgatcttactggggcctcaggtgaagtatgaagcggcccgattgacggagcttgctgcaccgcacgggaaagccgtggcggtgatcgacatggcggattacggcatgatgcgcggggccgccgtcctcgataaagcgctcgctctgctgaactcctaaccctttcccatcaacgcgttcatttcgcaacgccgctgcggccttgcgcggggatctgtacgccaaaaatgaggccactatgcaaacattgaaaattgccgtcatcggcggcggcagcagctatacgccggaacttatcgaaggcattatccttcgccatcagcagattccggtcacggaactggcgctggtggatgtcgaagccgggcgcgagaaagtggcgattatcgccgcgctgacccagcgtatgctaaagcgccatggccttgaacaggtgaaggtcagcgtgcatttcggcctcgatgaggccattcgcggcgctcaattcgtgctgacccagctgcgggttgggcagctggcggcgcgggcggcggatgagcggttggggctgaagtaccatctgctgggtcaggaaaccaccggcgtcggcggctttgccaaagcgctgcgcacgattccggtgattttacaggttgcccgcaaggtggaagcgctggcgcccgacgcctttatccttaattttaccaatccggcagggatcgtgacggaggcggtgagccgctacagcagcgcgaaaatcatcggcctgtgcaacgtgcccatcaatatgcagcacatgattgccggaatgctggacgcaaaagaagaggaggtccggctgagcttcgccgggctgaatcatatggtctgggtacacaaggtgatgcaggggcgggaagaggtgaccagtaaggtcatcgacatgctgtgtgacggtcaatcgctctcgatgaacaatattcaatcgctgccgtggccggcggagtttctgcgggccctgaaggccatcccctgtccctatcatcgctatttctggctgacgccggcgatgctggcggaagagattgaggcggccaaaaccaaaggcacccgcgcggaacaggtgatgaaggtggaacaggagctgtttgatatctatgcccggcccgagctggatgaaaagcccgaacagctgagcttccgcggcggggcgtactactccgaagtggcggtggagctgattaacgccatctacaacaatcttggcaaagagatggtcgtcaacacccgcaacaacggcgcgattcaaggcttcgatgatgatgcggtggtggaaattaacagcattattgacgcgcagggcgcacgaccgctggcctttggcgcgctgccaccgatcatgaacggtctgacgcaacaggtgaaagccttcgagcgcttgacgattgaggccgcggtccacggctgccgggatagcgcgctgctggcgctggtgagtaacccgctggtcgggaatgtgaccgatgcccgggcgctgcttgatgaggtgttaaccatcaaccgcccctggttaacgcagtttaactaaacttttccgccttcggggataccactatgtctcgtacttcatttattgaacgctatgtcatgcccgccgcgctgaaaatcggcggtcagaagcatgtcctgtcggtacgcgacggcattattctcaatatgccgtttatgctgattggctcgtttttcctgatattcgcctacctgccgattcccggctacggtgagatgatgaccagcgtgtttggcgatgcctggcgcgataagatgctgtacccggtcaaagcgacctatgacatcatggcgctgctctccgcgttcggcattgcctaccggctggcggaaaaatatcgcaccctggacccgctcagcgccggggcgatgtcgctggtggcgtttgtgatgacgatcccccaggtgacgctctttacgccggcagacggttcggcggcgcaacttgtcaaaggcgtgctgccggtggggatgattggcagccaggggctgtttgtggcgattgtgatttcgctgctttccacggagatctaccgcctggtggccagccgtaatctggtgatccgcatgccggagggcgtaccgcccgcggtggcgaaatcttttctcgccctgatccccggcttctgcgtgctggccgtggtgctggcgctgcgcctgatcgttgaagcttcgccgttcggtgatatcaatagcatgattaccacccttatcggtattcccatgtcgcacgtcggcggttcgctgccggggatgattatctcggtgatcctgattggtatcctgtggaccctggggctgcatggcgacaccattgtgctggtgtttattcgcccggtctggctgtcgaatatgtcggaaaacctggaagcgtttcagaatgggctgccgatcccgcatatcatcacccagcagttttatgacctgtggattgcgcccggcggtaccggagcgctgctggggctggtgatttttatgctgctgcgcagccgtagccagcagatgaaacagctggggaaaattgccgcgccgggagcgctgttcaatatcagcgagccgatggtattcggcattccgctggtgatgaacccgtacttcttcctgccgtttattttgacgccggtcctgctggtgattgtctcgtataccgcgatggccaccgggctggtgatgaagccggcggggattgcgctgccgtttaccacgcctatttttatgagcggctatctggcgacgggagggcatatttccggcgcggtgctacaggtggtgaacctggcgatctcgctggtgatctactatccgttcttccgggcatgggatcgcctgaaggcgaaagaagagcaggcgtccgcgcagccggaagccagcgcgacgctgtctgcggccgatcgtatttaaagcatattcccggaggcggcgcttgacgcgcctgtccgggctaccggctcgcagaagatggtgaacccgtagcccgggtaagcgcagcgcgacccgggactctcagcgcaagccgggtagggggttacgcctgcagccaccataccgcttcaaacggacgcagggtcatatcggcagggcggttcgccgcctccgcgtagttgctcatcagcatccgccagtcgccgctcatcgcttccggctgccagcgctggaactcgcggctcaggttcgccacgaccaccagggtttgcccctgccactgacggcgatagcaccacagcgacggatgttccggcagcagatcctgatagtcgccccaggtcagcaccggcgtgctcttgcgcagcgtaatcagctgctgataggcataaaataccgattccgggtccgccagcgccgcctcggcgttaatctcgcgatagttatcgcacagcgcaatccacggctcgccggcggtgaatccgccgccctcaccgctgttccactgcatgggcgtgcggctgttatcgcgcgatttgctggccagaatcgccaacagttcatccgcatcccggccctgcgccgcgcgttcgataaacatgttgtggctctcaacgtcgcgataatcggtgatgcgcgtaaagtgcgggttggtcatgccaatctcttcgccctgatagatatagggcgtgccctgcatgccgtgcagcaccatcgccagcattttcgccgccgggacgcggtactccccctcgtcgccgaagcgggagacgatgcgcggctggtcgtgattacaccagaacagcgcgttccacgcgcgattgtgcatcccctgctgccagtgcctgaacagcgatttcaaggccacaaaatccgggcgcgccagcgtccacttctcgccgccgggatagtccaccttcagatggtggaagttaaaggtcatcgatagctcgctgccgtcgagcgccgcgtacttctggcaatgctcaagcgtggtggaggacatttcgcccaccgtcatcaggttgcgcggggtaaagacatcgcggctcatctcctgcaagaattcgtgcgctcgcggaccgtcggtatagaagcgccggccgtcgcccgcggtatccgacgggaaggtctggtctttggagataacattgatcacgtcgaggcgcaggccatcgacgccgcgatcggcccagaattcgcagacttttttcagctccgcgcgcaccgccggattttcccagttcagatccgcctgctcgacggcgtacagatgcagatagtactgctcgctttcggcgtgccactgccaggcgttgccgccaaacttagattgccagttgttcggcggcgtggtcggttcgccgtcgcgccagatatagaactgacgatacgggctctctttgttgagcgcttcgcggaaccaggcgtgctcggtcgacgtgtggttcagcaccatatccagcacgatacgaattcctcgcgccttcgcctgggccaccagctcgtcgaaatcgtcgagcgtgccgtaggcgggatcgatagcggtatagttggccacatcgtagccgttatccacctgcggcgagacgtaaaacggcgtcagccagatagcgtcaacgccgagcttttgcagatagtcgaggcgggaggtcacgccgcgcaaatcgccggtgccggtcccggtggtgtcctggaaactctttggatagatttgataaataacgccgttttgccaccagaggggaagggtattcatattgcgttcctgctacaaaaaaggggggcgacagcgcgccccgaaaataagtcgtcagacaatctgtaaggtgccctggcggaatttgcgctggtaaacaaccgttgtcaggacaatcggcacgaccacggcgatagccatcgccagcgcgtaaacctgccagtaggttggctggatagagagaatgcccggcaggccgccgacgccgatgccgttggccatcacgccgttcaggccgcacagcagcccggcaagaccggagccgaccatcgcgcagagcatcgggaagcggtatttcaggttgatgccgtacatggccggttccgtgacgccgaggtaggcggaaatggcggccggaacggagatttcgcgttcgttctgtttacggctggcgatgatgatacccaccaccgccgacgcctgggcgatgttggacagcgcgatcagcggccagaccggcgtaccgcccatgctttgaatcatctgcatatcgatggcgagcgtggtctgatggaccccggtaatcaccagcggcgcgtacaggaagccgaacagcgcggcgccaatcggcgcgaagctgccggttaacagatgacgcacggcccaggccacgccgtcgccaatcatgcggccaaccgggccgataaaagcgtgggcgagaaagaccgccaggatcagcgaacagaccggcacgatcaccagatagaggtagtcaggcacgatgcgtttcagccgcgtttcgataaagccgagcgccagccccgccatcaaggccgggatcacctgcgcctggtagccgactttctcaatggtgaacaggccgaagttccatacttccggcacctgctggcccagcaggtaggcattcatcagctgcggagaaactaacgtaacgcccagcacgatgccgaggattggcgtgccgcccattttctttaccgcggaccagcagatacccaccggcaggtagaagaagatcgcctcgccaatcagccacaggaagtcataaagggttttcagcgacgggtgcatctgcgccagcgtctggccgttgctcatcggcagatcgccgatcacgttgcggaagcctaagatcaggccgccgctgatcagcgcaggcagcagcgggaagaagatctccgcgaagtgtgaaatgagctgttcatgccacttcatattctgccgcgcggctttcttggcttgttctttatcggcgctggcctggccggtggtcgccagcagcgctttatagtagtcgccaacctcggtaccgatcaccacctggaactgcccggcgttggtaaagcagcccttcaccatgcggagctgttcaatttctttcggtttggcaatggctggattattcagcacaaagcgcagacgggtaatacagtggctgacggtggcgatattgtcgcgcccgcccaccagttcgataagtttatcgatgtcctgctgattcactttactcatgatgaggcctcatgaccgaggggagaggttgcatttaacttgcattggatcctactcgctccgtttgaattgcaaaatgggaacgttcccgaaacccagcgaagatcacataaatcgttaagacaggcttaattcagtacggcgggaatcacgatttgacggggttcacggtttccggcgatctgctcgatcagctgctgcgccgcctggcgtccggactcggcgtagccgggatcgaccgtcaggatctccgggtggagaaacttcatcagcggcgtgctgccgacgctggcgagctggagacgatcgattccctgctgctggagatatttgctggctcccagcgcgagggtatcggtggcgcagaccagcgcgctggtttcagccgacagcacgccggcgacgttttcatacccctgcttcatgcccaggcccggcagcgcggcgaggggcgtgaggtgttttttctggcagaaatcgaggtaggcctggtggcggcgctgcccggtggtgatgtcgctgtgcggcacgccgaggaaactgatgtggcgatgcccgcgatcgtacaggcgctgcatcagcatcctgatcgaaccttcatcgtcatagcagacggaggcgatgcccggcgcgtcgcgggccagcagcaccagcgtctctcgccacggggtgagcatctcttcatggatgccggtgaaaccaaacagcaccacgccgtcgatattgcgccgggcgagcatgccgagatgctcctcgaccagcgccggggagaactggctctccatcataatcggatcgtagccctgagcgtaaaaggcgggaagcatggtctgtacggcgaggttttccgatagcgaatccagacgggtgacgatgatcgccaccactttatcgctctggccgcgcatcgccctggcggaacgtgagggcgaaaacccgtgctgctgcatcaccgcttcaacgcgctcacgcgtgcgttcgctgacgccgctttcgttgttaagcacgcgcgataccgtcgatttcccgacgccgcttaagcgtgcgatatctttgatggtcagccggttttgcatgcagggttctcgttgtggtccgcttaaagtgagcctaatgctactcaacgaaaccacaatgagcaaagtctggtttacgtctggtttagttgcccgggggtattatcgccataatagccacaaatagattatcggcgacggtataattcgcgccgtttgtattcatttaccggagattttatggaccccgatcccactcctcatcctcgatggagcccccttattttccggtaaatctgcgtagcgctgctttaccggaagcgtaaagcagcgatgtctttgacgtccctgccataaaaataacatgcctgacaggtaaggttgactcgcgcctgtcggtagcctgcgttcgctcgcgcgagcgcggagggactgtttatgtttaaaaattttacccgccagctgtttgcccagcttggtcgtcatttaccgcgtcgtttagtacaacgcgatccgctacccgatgcccgcaatctggcgagcgcgccgatcccggactccctcggcaagcagtgcctggacgtggcggcaatggatgagaatgaaatctggcgcgccttcgccagccatccggaagggctaaatgcgggcgaagtggcgcagaaaatcgcgcagtatggcgaaaaccagatcccggcgcagaagccgtcgccgtggtgggtgcatctttggagctgctaccgcaaccccttcaacctgctgctgaccgttctgggtatcgtctcctactcaacggaagatctgtttgccgccgcggttatcgccctgatggtggggatctccacgctgctgaactttattcaggaagcccgctcgaccaaagcggcggacgccctgaaggcgatggtcagcaacaccgcgacggtcctgcgggtggtgaacgagcagggcgagagccgctggtgcgagctgcccatcgaccagctggtgccgggggatatcgtcaagctatcggcgggagacatgatcccggcagacctgcgcgtcattcaggcgcgcgacctgtttgtcgctcaggcctcgctgaccggtgaatcgctgccggtcgaaaaagtggcccgcacccgcgacccgctgcaggcaaacccgctggagtgcgacaccctgtgctttatgggtaccaacgtggtgagcggttcggcgcaggcgattgttttcgctaccggcggcggcacctggtttggccagctggctggccgcgtcagcgagcaggaaagcgagccgaacgcctttcagaaagggatcagccgggtcagcatgctgctaatccgctttatgctggtgatgaccccgatcgtgctgctgattaacggctacaccaaaggcgactggtgggaggcggcgctgttcgcgctctccgtcgcggtgggcctgaccccggaaatgctgccgatgatcgtcacctcgaccctggcgcgcggggcggtgaagctgtcgaaacagaaagtgatcgtcaagcacctcgacgcgatacagaactttggcgcgatggacatcctgtgcaccgataaaaccggcaccctgacgcaggataaaatcgtgctggagaaccacaccgatgtctccggcaaggtgagcgaacgcgtgctgcatacggcatggcttaacagccactatcagaccgggctgaagaatctgctcgataccgcggtgctggagggcgtcgagctggagtcagcgcgcgggctggcggaacgctggcagaaagtcgatgagatcccgttcgattttgagcgtcgccgcatgtcggtggtggtgcaggagcaggacaacgtccatcagctaatctgcaagggggcgctgcaggagatcctcaacgtctcgacccaggtgcgctataacggcgacatcgtaccgctggacgacaccatgctgcggcgcatccgtcgcgtaaccgacaccctcaaccgtcagggactgcgcgtggtggcggtggcgacgaagtacctgcccgcccgagaaggcgactaccagcgcgcggatgaatccgacctgatccttgaaggctatatcgcctttctggatccgcctaaagagaccacagccccggcgctgaaagcgctgaaggccagcggcattacggtcaaaatcctgaccggagacagcgagctggtggcggccaaagtctgccacgaagtaggtctggatgcgggtgacgtggtgatcggcagccaggttgaagcgctgagcgatgatgaactggccgagctggcaaaacgtaccaccctgtttgcgcgcctggcgccgctgcacaaagagcgtatcgtgactctgctgaaacgcgaaggacacgtagtgggatttatgggcgacggcattaacgacgctccggcgctgcgcgcggcggatatcggtatttccgtcgacggcgcggtggatatcgcccgcgaggcggcggatatcatcctgctggagaagagcctgatggtgctggaagagggggttattgaaggccgccggaccttcgccaatatgctcaaatacatcaaaatgaccgccagctccaacttcggcaacgtgttcagcgtgctggtggccagcgccttcctgccgttcctgccgatgctgccgctgcatctgctgatccagaatctgctgtacgatgtatcccaggtcgccattccgtttgataacgttgacgatgagcagatccgtaaaccgcagcgctggaacccggcggatctcggccgctttatggtcttctttgggccaatcagttcgatattcgatattctgacgttctgcctgatgtggtgggtgttccacgccaacacgccggaacatcagaccctgttccagtccggctggttcgtggttggcctgctgtcgcagacgctgattgtgcatatgatccgtacgcggcggatcccctttatccagagccgcgcggcctggccgcttattgtgatgacgctgctggtgatggtagtggggattgcgctgccgttctcgccgctggcgggctacctgcagcttcaggcgctgccgctcagctacttcccatggctgattgcgatccttgcgggctatatgacgctaacccagatggtcaaaggcttctacagccgccgctacggctggcagtgagcgaggcgctttacgtgcagaaacaacaaaggcagccccgggctgcctttgttcatactgtctacgattagcgacgaatggcgatcgcttcaatctcaatttttacgtctttcggcagacgcgccacttccacgcaggagcgcgccgggaaggtggcgttgtgctcggtgaagaaggcttcataggtggcgttaacggtggcgaaatcgttgaggtctttgacgaaaacggtggttttaacgatatcgcccactttcaggcccgcggcttcgacgatagctttcacgttctccagagactgacgcgcctgagcggcgacatcttccggcacgctaccggttttcgggtctaccgggatctggccggaagtgatgatcatgttacccagatcgacgccctgaacgtacgggccgatggctgctggcgcattttccgtcgcgatagttttagacatgagttctcctgaaatatgtgaatgtaatctgactggcgtgggtcattataaagagtgctggctgctttatcattaagcaggccgcattttgcgaaggagaaaagcggataacgcagcgcgctatccgcataaggcgtgagcctgaaggatgaagttagtgggtgacttccgtccatgccatggcccagtcagaacctgtgcccggttcgaactgagtggcgtactggctccactgcacgcagtagccgctgtaggggaacgggcgacattggtacactttgccgtttttaggctgcatgactttcgttcccgccttatagcttttcaggttatccgggaaggtatagtcgtagtttcccgcaggcgcaggcgtcggggtcggatccggctgaaccgtactctcttccagcatcaggtcaatgaccccctggctgagggtggcgccctgcgcattgctggcagagtagcgcagcatatgatgacctgcctgaacgttggtcagcggaatagataccgtcagggagcgattatctatcgtctgctgaatgctccctttctgcgtgcccgcatggtcgttgacggtggcggtgagatgcattttgcccctggccgtggcgttgaacgtcaccgtcgctttcccgttggcgattttggttgcgttaacgttggcgacgctcagggattcttccacgatatcgtctgactgcgactcggcgtaggtcagcgtaacgctttgaacggtgctgtcttttggcacatacacctggttaacgccgtggaggggggtaatgttgccatcactcccttttaccccggcgcgcagcttaccctgatgcgcggtattaatagcttcagccagatcgtaagaccactggctgctttttccttgcgcttcgctggcgatggtcaattccgtttgcagagaatgaacttcaccgctcgcgttaaagaaatgggcaatgactttatctcccgcatggagatctttcccgctaagctggcctgcgagctgcgtagtccagagggattcattctccgtttcatcgctggcgccgccgaaatcaacgtcaatggcctgataaaaactatttgccgtatcggcaatttcccagacggcataaataacctgatagccggtgcgatcgggtacattacaggagtgcgtgacctgtacagccggcgtcgcgccattaccgtcgatttgacaaaatggcttactttcaaaatcgctgcgcgtcagcggcttattttgatcccagttctgtttggtaatgtaataacgccagttagtcgttctatgcggcgcagaatggtgccagacgaaattatttttaccgctctttatcgtggttttcgcccagcgagtcgggctctggctatccagctgcgagaagttgcttttacccgcgctggccagtttaccatcaggcggcattgccccttcaggaaaaccgctcgcttgctcgacgctttgcggttcccactgcaccgaaccgcagtcggtgtttttccctaaatgacattggtacgcccgacttggcggcgattccacatagccgtgagccaatgctgaggaggtaaataataatgttgctgtatataacgatatttttttcactttcataattcatcctgtgaacattgattaaaaaaatagaaaacgcactggagtgtatgaagggaaaaattcaggttcaatagcagtgatatttaatgattaatctcattgtttgttatttttaatcatgagacgtgttgatgagaaattgatgaatgttgattatctgacccgaggtcagtgagttgacggccgtgcggatgatttaaattatcgttcaggagcagtcccgcttatcgggctgctcccgataaaacctggcgaatttaatttgccagcacgacatgatgtgaaaattctttttcacaatatttgcacttcagcgcgatatcgttttcgcgtttcttcaccgcaaagctggaggacaccggctcggcgtggctaatacagttgctgttcgggcataccagcacgttgttaatacggtccggcagattcggtcgggatttaccgacgacttcatactcatcaatgcggtttaccgtggcctgcggcgcgtacagggagagctggttgacctgctcgtcggtcaggaaggtgttctcaattttgatcaaatctttgcggcccatttcgcctgacggcaggttcaggccgatggtgatgcgctgatccgtttcggtcagtttgaacagggtcagcagcttaaagccgacctgcgccgggatatggtcgataacggtgccacgtttgatggcttctacctgtaatttattgtcgtgtgtcatctcttttccccttacagtgccagatcgctattcagtaccagcgccagtaacgcctggcgcgcgaagatgccgttgcccgcctgctggaagtaccaggcgtgcggcgttttatcgacgtcggtggtgatttcatcaatgcgcggcagcggatgcagcaccttcatgttcgcgcgtgcgccttccaggtctgcggcgcgcaggacgaactgcgccttcacgttggcatattccgacgggtcgagacgctctttctgcacgcgggtcatatacagaatgtccacctcttccatcacctcttcaatggcgctatgcaggctccaggcaatgcctttttcatcgagcatgtcgaggatgtactgcggcatggccagcgcgtccggggcgataaagtagaagcggttgccgttaaatttcgccagcgcctgggtcagggagtggacggtgcggccatatttcaggtcacccaccatcgccacgttaagattttccagacgaccctgggtctcctgaatggtgaacagatccagcagggtctgcgtcggatgttggttcgcgccgtcgccggcgttgagtaccggaataccgccggaaaactcggtcgccagacgcgccgcgccctcctgcgggtggcgcatgacgatggcatcgacataggtgctgatgaccgagatggtatcggccagggtttcgccttttttgcccagcgaggtgttgctgctgtctgagaaaccgaccacgctggcacccaggcggtgcatggaggtctcaaacgacaggcgggtgcgggtcgacgcttcaaaaaagcagctggcgatcactttatgcttgagcagctccggctgcggattggctttgagttttgctgcggttgccagtaccagttcaaggtcttcgcggctgagatcgtttatggaaatgatatgtttttgatatagcgggttagccatgtttatctcctgacgcctgggcaaaaaaaaagccccttaaataaggggctttacgaatacggatgcaacggaaagaaaaaacggcaggccagcgtctgttttcagacgcggtaagacgcgatgtcgtacacactgaaccataattcctcccggcaaaacgggtggcattatacgcagctcatatttcggatcaagcgattaatccacaaacaggtaaacgtttgcctggggaatcatgcgttaacgcaaaaaacccgcaaaaagaggtggtatggcagtcggatggggggtataaacgcgaaatgaaaagctgttttatatttgagggctattatgatcgttggaaatattcaccatctgcaaagcggattgccggcgtctctgcgtgaggcgatcgaacatgttaaagcgcatgtcaccgacgcgacgccgctgggtaaacatgatattgacggcaacaacctgttctatctcatttccgaagataccaccgagccgatggccgaccgccgcgccgagtatcacgcccgctacctggatatccagattgtactgaaaggccaggaaggaatgacctttagcgttctccctgccggcgcgccggatatcgactggctggcggagaaagacatcgctttcctggcggagggggcgcaggaaaaaaccgtcatcctcagcgaaggcgactttgtggtgttctatcccggtgaagtgcataagccgctgtgcgccgtcggcacaccggcgaaggtgcgcaaagcggttgtgaagatgctgatggcgtaaaaaataccccgggctgcggctggcgccttgcccgggctacagatccgcgcggtttgggggcgggtagcccggataaacgcagcgcaatccgggggaatatcgcgagaacgcttacttacccagcgtcgccaccatcaccgctttgatggtatgcatgcggttttccgcctggtcgaaaacgatgctcgccgcggattcaaatacctcgtcggtcacttccataccaccgtgcaggccgtactccgccgccatctgtttgccgagcgtggtctggtcgtcgtggaacgcgggcaggcagtggaggaatttcacctgcggattgccggtcagcgccatcatctcgctatttacctgatacccgcgcagcagcgcgatacgctccgcccacttctctttggcttcgcccatcgatacccagacgtcggtatagataaagtccgcgcccttcacgcccgccgcaatatcttcggtcagcgtaatattgccgccgtttttctgcgccagcgcccggcactgctcgaccagcttctcttccggccagcaggcggttggcgcgaccagacgcagatccagcccggtcaacgcggcggcttcgagcatggagttgcccatattattccgcgcgtcgccggcgtagaccagggtcatctgattaaaggctttgcccggcagatgctcctgcatggtcagtaagtccgccagcagctgggtggggtggaattcgttggtcaggccgttccataccggaacgccggcatactcggccagggtttcaaccacttcctggccgtggccgcgatattgaataccgtcgtacatgcgccccagcacgcgggcggtgtctttaatcgactctttatggccaatctggctgccgctggggccgagccaggtgacgcgagcgccctggtcaaatgcggcaacttcgaaagagcatcgggtgcgggtagagtctttttcgaagatgagcgcgatgtttttgccggtgagatgctgaatttcaatattgtttttcttatcagctttaagcctggccgccagctcaagcagagcggtgatttcggcgggggtaaaatcgagcaactttaaaaaatgcttctgataaaacgcggacatggttccctcacatggctcaagccatttgttgaattaaaattcactttatatgtatgaatattcatttgcaaccccgtgtcataaatctttcgctcagaaggtggaggcaatcacggcggtatgtgacaatagaagcatccgcgacacattatgaggaacgagccatggcaaacccggaattactggaagaacagcgtgaagaaacgcgcctgattattgaagagctgctcgaagacggcagcgatcctgacgcgctgtacaccattgagcatcatctctctgccgatgatttcgaaacgctggagaaagtggcggtcgaggccttcaagctgggctacgaagtgactgagccggaagagctggaagtcgaagagggcgataccgtgatttgctgcgatatcctcagcgaatccgcgctgaatgccgagctgattgacgcccaggttgagcagctgatgaccctggcggaaaaatacgacgttgaatacgacggctggggcacctactacgaagatccgaacggggaagacgaagaaggtgacgacgacgaagatctggttgatgaagacgacgacggcgttcgccactaagtagcagaggtatacggcggtgcgatatgccgccgtatagcaaggaattttaatggattacccgcaaatactcgccccgattttaagctttctgcattgcccaactcctcaggcgtggattgatgaagcccgtaaaccggaaaacctcccgctgctgttgaccgaccatatggtgtgcgagctgaaagcggcgcaaaacgctatgctgctggtgcgtcgatacgtcgcggataaagcggacgcggatgagctgctggcctgcctgaagccgtatgaggacttcacctaccgctgggggccggagccggatttcgtcgcgctgcataagcagataaataaaagcgccatgccgcagaccgacgatccctggggacgtcagctactcgacagcatgattctgctgatcaaagaggagctgcatcacttctggcaggtgagggaaatcatgctttcccgcgaaatcccgtacgtcaaaatcaccgccagcaactatgcccgcgggctgcgccgggaagtgcgttctcacgaaccggtcatgctgatcgataaactcatctgcggagcctatattgaagcccgctcctgcgagcgttttgccgcgctggcgccatggctggatgacgatctgcagaagttttatctgtcgctgctgcgttccgaagcgcgccactatcaggactatctggacctggcgcagagaatcgcccaggacgatatcagcgaacgcgtgcgccagcttggcgaagcggaagcggcgcttattaacgcgcctgaagcggagtttcgttttcacagcggcgtgcccgcctgaacgtcaggccgccgcttcaccgcagcggcctgacgatccattacagattggcgtttttgtctttctctgccgtcgcggcggctttgggcgcgccgagggtcgctttaaaccagttcaccacccgttcaataaccggcttctgataccagctgtcatcgccgtgctccgcgcccgccagcaacacgtaatcggccgggttgccctcctttttcagcgcgcgatagagctgttgactttgtaccggtgaaaccagggtgtcggcgctgccgtgcataattaaaaacggcggctttttaccgctgatatggcccatcgggctggccgccagggctttttgcggatcgctgtcaatcgtcgctcccggccagtcgcgaaaggcgctaccgtgtaccagcagcgcttcagtgaccgccggcgactggtgcactttttgaatcgcctgcggaaaaccttcgccgatattcaacaggttcgagataccgtacagcgtggcggcggcctgcacatccgaggattgtgccaggttatcgccacgctcgaacgttttgtcaccgttggtgagcgccagcatctgcgccatatagccgcctgcggaatcccccagcacgccaatacgcgacgggtctataccgtattccgcggcatgttcgcgcagatagcgaacggcggctttaccatcgataaccggggccggaaaggtgtcgggaaccgtacggtattccgccgccgcgacgacgaatcccgccgccgccagcgccatacgcatctcgataaacttattccaggccgcgctggtgaaaccgccgccggggaaatagatgattgccggtttcagatcgccgttacgcggtaccagtaaagacatatgcagctgacgaacggcgacggtgctttttacctggctataaacgatatcgttgagcgcatcgatacggccccgggttttttccacgcgaatgacctgagcgccttcggtattgccagcaagttcgccggcgttaacgcaggaagccatgccggcaagcagcaggccgccggtgagcaggagggggagttttttcatgatgttctatcctgagcaaagcctgccgcggcggcaggcgaaaagatccaatgctcgaagagtgtattagcgaaaacgggcggtgaataacgctctttttgcatgaaaaccatgcattttttcgattaatcaacgtcgccgttttgcgggcgctacagcactttcaacatcctgacttcgcagtcaacgtggccggtgcagcccagcggctcagcaatatgctcgaagccgaggtgctcatataaaccgaccgcttctttcaggaaggcggtggtttccagatagcagcgtttgaatccctgctcgcgggcgtaatcaagggccatcagcgccagctttttcgccagcccctggccgcgcgcggaggtcataaaatacattttttgtagttcgcagatatcgggctcgctgcaggagagcggtgccacgccgccgccgcccaccacttcaccattctgctcaacgacccaataggcggaacccggctggctataaagctcatagagttcatccagattcggatcggctaccgtatagcctttgtcggcggtcagaccatattcagcggagacctggcggataacagcggcaatcgccggattatcattagccgtgatgcggcgcagggttagcggtagggttgcgctcgtattcatgtgaagactcattgcaaaataatgacggataatgttgttaataacactgcgggaggggagagtgcaagcgaggatctttcacagaaaacgccccttatccgaatggataaggggcgagtgaattacagcgcggcgataatcgcctgctgctcaatcagcttcgcttttgcttccgcgtaaccttccagcttctcacgctctttggcgatcaccgcttccggcgcgcgcgccacaaagccttcgttggagagtttgctttcgatgcggccaatctcgccttcgattttggtcacctctttagcgaggcgcgccagctcatcttctttattgatgaggccagccatcgggatcagcagctcggcgccgtcgataattttggtcacggaaaccggacctttatcatcggcaggcagcacggtgatgctctccagacgcgccagattcagcaggaagctgcggttgtcgttcacgcgacgaatcgcggcttcgctgcagccgcgcagcagcagctccagcggcttacctggggcgatgttcatttccgcacggatgttacgcacggcgacgatcgcttgcttcagccattcggtatcggccagcgccgcttcgtcaacctgagacgcatcgtactgcgggaacggctgcagcatgatggtatcggcagtgataccgcaaatgaccttcacgcgctgccagatggtctcggtgatgaacggaataatcggatgcgccaggcgcagcagaccttccagaacggtcaccagcgtgtgacgggtgccgcgcagctcagactcggaaccgccgttcattaccggcttggttagctccagataccagtcgcagaactggttccaggtgaactcgtacagaatgcctgcggcaatatcgaagcggaagccgtccagcgcttcgcggtaggctttgatggtttggttgaattccgccaggatccagcggtccgccagcgacagggtcatctcgccgccgttaaagccgcaatcctgatcttcggtattcatcagcacaaagcggctggcgttccacagcttgttgcagaagttacggtaaccttccagacgcttcatatcccagttgatatcgcggccggtagaggccagcgccgccagggtaaagcgcagggcgtcggtaccgtgcggctcaataccgttcgggaactgcttctcggtacgtttggcgattttttccgccagctgcggctgcatcatgttaccggtgcgtttttccagcagctccggcagggaaatgccgtcgaccatatccagcgggtcgataacgttgcccttcgatttggacatcttctggccttcgtcatcgcggatcaaaccggtcatatagacggttttaaacggcacctgcggcttgccgttttcatctttgatgaagtgcatggtcatcatgatcatgcgggcaatccagaagaagatgatgtcgaagccggaaaccatcacgctggtcgggtggaactgacgcagggcatcggtgttttccggccagccgagggtggagaaggtccacagcgcggaggagaaccaggtatcgagaacgtcttcgtcctggcgcagcgccacgtcggcgcccaggttattttcctgacgtacttcgtcttcggtgcggccaacgtagacgttgccgtcgttgtcgtaccatgccgggatgcggtgaccccaccacagctggcgggagatacaccagtcctgaatatcgcgcatccaggagaagtacatgttttcgtactgcttcggcacgaactggatgtcgccgttctccaccgcttcaaccgccggtttagccagcacgtcggcgcggacgtaccactggtcggtcagcatcggctcaattaccacgccgccgcggtcgccgtacggaacggtcagatcgtgcggtttaatctcgtccagcaggcccagggcgtcgatagcggcaaccaccgctttacgcgcggcaaagcgctccagcttctggaactccgccgggatggcgtttgagtagacatcggactcgttgcctttggtgtcgtaaacttccgcggtttcgcggatgtcgccgtcaaaggtcaggatgttgatcatcggcagcgcatgacgcttgcccacttcatagtcgttaaagtcgtgcgccggggtgatcttcacgcagccggtgcccttttccatatcggcgtgttcatcgcccacaatcggaatgcggcggtcaaccagcggcaggatcacgaatttaccgataaggtctttatagcgcggatcttccgggttaacggccacgccggtatcgcccagcaccgtctccggacgggtggtggcgacgaccagataatctttaccgtcagcggttttcgcgccgtcggccagcggatagcggatatgccacatcgagcctttagactcgcggttttccacttccagatcggagatggcggtgcgcagtttcgggtcccagttgaccaggcgcttgccgcggtagatcagatcttctttgtacaggcggacaaagacttcttttacggcgttggacaggccttcgtccatggtgaagcgctcgcgctcccagtccacggagttgcccaggcggcgcatctgacgggtaatggtgccgccggattccgctttccactgccagattttatcgataaaggcgtcgcgaccgtagtcgtggcgggttttaccttcttcggcggcaatcttacgctcaaccaccatctgggtagcgatacccgcgtggtcggtaccggcctgccacagggtgtttttaccctgcatgcgctggtagcgaatcatggtatccatgatggtttgctggaaggcatgacccatatgcaaactgccggtgacgttcggcggcgggatcatgatgcagaaactttcctggctttcgtcgccattgggtttgaaatagccctgcttttcccagtgctcgtaaagcggctgttcgatatcttgggggttgtatgtcttttccattatttccaggttgccgtgttcaggttgaaaccagccatgcggtacgctttatagcgttcgcgcgccagttgtttcaaagaatcttcataagggacgaagtctatcacttctgtgaaagcggtggcaaaatctgcaaagtttagccgcaggctaatcagaatatcccgcgggctgctgttgcgcttttgcggccaggcgatctccaccggcgcgccgccgcgcggaccttctcccgccagattatgcggaacgaaactttccgcgggtcgagcccagagcgcttcgtccagacgaacggcctgctgctcatcttcacaggcgatgagtacccgcttgccgctgcgccaacgttctgcggcaatgtcacacaccagttgttcaacggcgctcaggccgtcttgttgcgtatcattgtccagaagatagaacgttgcgtttttcatatatggggcttcttgtggtgactttaaatgcttaagccgggcggcgctacgctgacccggcctataaacggcatcttttcgttggcccggcaagcgtaacgccgccgggcatcagacggcaattactcttcgccggtaaatccggcgcggttgagcaggaactgcgacagcatcgccaccggacgaccggtcgcgcctttggcttttccggaacgccacgcggtaccggcgatatccaggtgcgcccagttgtacttgcgggtaaagcgcgccaggaagcagcccgcggtaatcgccccgccgggacggccgccgatattggccatatccgcaaagttagactccagctgctcctggaactcgtcgccgagcggcagacgccatgcgcgatcgcccgccagttcggacgcaccgatcagctcgtgggccagcgggttgtggttcgacatcagaccggtgatgtgatggcccagcgcaatcacgcaggcgccggtcagcgtggccacgtcgataacggtttccggctcgaagcgctcaacgtaggtcagcacatcgcacagcaccagacgcccttcggcatcggtgttcagcacttccaccgtttgcccggacatcgtggtcaacacgtcgcctggacgataggcgcggccgcccggcatgttttcacatccggccagcacgccgacaacgttcagcggtagctgaagttcggcaaccatacgcatcacgccgtacaccgccgccgcgccgcacatgtcgtatttcatctcgtccatgccttcggaaggcttgatggagatgccgccggagtcaaaggtcagacctttacccaccagcacgatagggcgcgcgtcttccgccgggttgcctttatattcaataaccgacatcagcgattcattttgcgaaccgttgccgaccgccagataggagttcattcccagctctttcatctgctgttcgccgataacgcgagtaatgacgttcttactgtaggtatcggccagctggcgcgcctgagaggccagataggcggcgttacagatgtttggcggcatattgccgagatctttcgccgctttgatgccggcagcaatcgccagaccgtgctgaatagcgcgttcgccgctggtcagctcgcgacgggttgggacgttgaagaccattttacgcagcgggcgacgcggctcgcttttgttggttttcaactggtcaaagctgtacagcgtctctttggcggtctcgaccgcctgacgcactttccagtagttattgcggcctttgacgtgcagctcggtcaggaagcagacggcttccattgagccggtatcattcagcgtattgattgttttctgaatgacctgcttgtactgacgttcatccagctcgcgctctttgccgcaaccaataagcagaatgcgctctgacagaatgttcggcacatggtgcagcaataaagtctggccaggtttgccttccagctcgccgcgacgcagcagggcgctgatataaccgtcgctaattttatcaagctgttcggcgatgggggagaggcgacgtggttcaaagacgccgaccacgatacaggcgctccgctgcttctccgggctaccgctttttacactgaactccatgcactatgctcctgaatcttaaagacaacagtggtggctacagatatactcgtcgtctttcaagttgcagatgcgttggctgcgcctgctcacccctgtcacttacctgatgtaagctccggggcttcacagtcctgccgcctgcctgcaactcgaaatccatagagtatagaaattgaaagctttcgtaactcatgtccgctgttgtggtgacttcgtgttaatcttaacgttattacggccttggttcgtcagaaaagatcctgatacgcagaaccagcgagtcatttaatcttagcgatgttttcgacgaccaaagagaataaatgacgtttaagccatgaaacaagcaattttcctgcaataaaacgggtttttacgggcgtatttatagtgataatcataagatatctggttcgtgagacgctgaaaagccagttggcgatcctattcatcctgctgctcattttcttttgtcagaaactggtcaggatcctcggcgcggctgttgatggcgatatcccgacaaatctggtgctctcgctgttagggctgggcgtacctgaaatggcgcagcttattctgcccctgagtttattcctcgggctgctgatgacgctgggcaaactgtataccgaaagcgaaattacggtgatgcacgcctgcggcctgagtaaagccgtactggtgaaagccgccatgatcctggcgctctttacgggcgtcgtcgcggcggtcaacgtgatgtgggccggcccctggtcttctcgtcaccaggatgaagtgctggcggaggcgaaagcgaaccccggcatggcggcgctggctcagggccagttccagcaggccagcgacggcagcgcggtgctgtttattgagaacgtcaacggcaaccgcttcagcgacgttttccttgctcagctgcggccgcgaggcaacgcgcgcccgtcggtggtggtcgcggataccggcgagctctcgctgcgtaaagacggctcgcaggtggtgaccatgaatcagggcacccgctttgaaggcaccgcgatgctgcgcgacttccgcattaccgacttcaaaaactatcaggcgatagtcggccatcaggcggtggcttccgacccgaacgataccgagcagatggatatgcgcaccctgtggcataccgataccgatcgcgcccgggcggagctgcactggcgcttcacgctggtggcaacggtgttcatcatggccctgatggtggtgccgctcagcgtggtgaacccgcgccagggccgcgtgctgtcgatgctgccggcgatgctgctctatctggtgttcttcctgctgcaaacgtcgattaaatcgagcggcggtaaaggtaaaatggatccgatggtctggatgtgggcggtaaacctgctctatttcgcgttggccgtgctgttgaacctgtgggatacggtgccgatgcgccgcttccgtgcccgttttaacaaaggagcggcgtgatgcaggcgtttggggtacttgaccgttatatcggtaagacgattttcaataccatcatgatgaccctgttcatgctggtttccctctcgggcatcatcaagtttgtcgaccagctgaaaaaggccgggcagggcaactatgatgcgctgggggccggaatctacacgattctcagcgtgccgaaagatatccaaatcttcttcccgatggcggcgctgctcggcgcgctgctggggctggggatgctggcgcagcgcagcgaactggtggtgatgcaggcttccggctttacccgtctgcaggtggcgctgtcggtgatgaaaaccgcgattccgctggtgctgctgaccatggcgatgggcgagtgggttgccccgcagggcgagcagatggcgcgtaactatcgtgctcagcagatgtacggcggttcgctgctttccactcagcaggggctatgggcgaaagacggccataactttgtgtatatcgagcgggtaaaaggcaacgatgagctgggcggggtgagcatttacgcctttaacgaccagcgccgcttacagtccgttcgctatgccgcttcggcaaagttcgacaccgagaataagctctggcggctgtcgcaggtggatgaatccaacctgactgacccgaaacaggtcaccggaacgcagacggtcagcgggacctggaagaccaacctgacgccggataagctcggcgtggtggcgctggacccggacgcgctgtccatcagcggcctgcacaactatgttacctatctgaagtccagcggtcaggatccgggccgctatcagctcaatatgtggagcaaaatcttccagccgctgtcggtggcggtgatga
